United States Patent Application Publication US 2008/0113342 A1 - sequence listing, part 13

SEQ ID NO: 49055 - DNA, 627 bp, Arabidopsis thaliana
gccgttggggatgtgcgtttccatcaaagtgtcattgcggattagacgtggttatctatacatcgacgtcagtatagaaccctggaagaccatacttccgttgtcctacgggtaaagatgtaagtataattgattttgggttttatttgttttagttgataattggtttgtgattgaaaatgcaggaccatttgtttaaatgggccgaagatggtacatacgaagaggttgtagacagtttgccgaaattgtccaccattgacaatgagaacaacgcagccaaatccgaggttgcagtcgagatcgaagcgttacaagtgatggtgaaagaactgaaggaagaaggaataaggagcaaaagggaaaactagacatctaaattgatgatcaaactttgctttttgtgtcttggctttgttatcgattttcattgttcttagtatcctaatgttccttaaaaacaaagaacagaggcttctgcttggcttctagagttgtgtctttttgtgtttatcttgcttctagagttgtgtctttttttcagtattagcttgtaatgaaatggtactgtggtttgggagtagttaactaatgttacgtctgagttagctaatattattgatgagt

SEQ ID NO: 49056 - DNA, 414 bp, Arabidopsis thaliana
cacataaacaaaaaatgaagaaacaaatcacaaaagatgatataatacaatggtgaagtgaggcgcttacctcagtcgaagaatgaacgtaattgctcgtcaatggctgcctgtgattgctcccaggccatagacgaaccaccttgttctgtactgcccaacaggtgggtactcgacctcatcagctctatggcggccatcaccgctctgaggatacccgacctctctccttctcctgcggccagcaccgcggtcgagtgatctccttgagtgaaggaggcgtgatctgctgctagatctagtgagtgtagccttccttcttctcttgtgctcccaggactcgaatgacgaatgcctagcctcggacatataaaagcccatagatgtggtacagctggatcttcaagtagacat

SEQ ID NO: 49057 - DNA, 611 bp, Arabidopsis thaliana
catcaatgtccctagtgattaaataagggacatgtcgagttggcagctctcgatcatggcagatggtgatggcgtgacgagttgcatactcctttggattctatattgacttcccaagaagtcctgtaactttaggtgcagaggtagatgctgattggccttctaagtatctgactttggtattcaatgcctccactttggcattcaggtcattgtagctgcagtccagcttatggtgcaattcaaataatttcttagcaatttccatggagctagatgcttgtccctgtagcaattgttgtaccatctgtttcatttcagcatcaggagcagcaggaccttggttttgcggaggtgcaaacccaggtggtggttgcggctggtagtcccctgaaattgctgcttaggaacaaaaccttggttgtagggaacaaacggtttgttctgaccttgttgttgctgtggaggataaacttggtcttgtggattacaacgttggtgctgcggtaggagaggttggggttgttggttttaagttgttgtacctttgtagcactctagttgttggtgttgaagttggtgtaactttgtagccatctggttgttgttga

SEQ ID NO: 49058 - DNA, 555 bp, Arabidopsis thaliana columbia
gggtaccgagctcgttcccttgtgaccgtgtacgacatgtatcaacctgactataacagacgaataaagtgtgttgctaagtacctgaaatacaaattctgaaaagacacaatgttagtatctcttataacaaaaacgaacttgatcttaacaattctgaaatctcaaatatagcaaacaaacacccaattggcaacggcgccaaattgataataaatttttaatcaattatcctaaaacacaattcatgtcattgtaatattttaggtgtcaatccaaatgggtgtgatgcaaacagatgagatgtgatcagaagtcattaagtcaagccaagcaataccagttttggggtttctaagagtcctaagcgaacatgcagaaaacagaagcaataacagaattactaaattcactcgaccacaacaggctgatgccagaagtaggatgtggtcgagtaacaggtcgagtaacagacaggatatgaaacagctatactcgactgcacagtctgttgccagcactgggtgtggtcgagtatactggcgagtacagaca

SEQ ID NO: 49059 - DNA, 520 bp, Arabidopsis thaliana
taatgggatgagttaataaatggattaacccatttaagtaataatttaattaattattattataaaataataataaataattatcattattaattcattatcatcaaacttaggatatttacggattccactttttattggtttacgtttttggcgggaaaatcacgggtttacgtttttggcggaaaaattataggtttacgtttttggcggaaaaattataggtttacgtttttggcgggaaaattaccgccttacgtatctggcgggaaaattacggatttacgtttttgacgggaaattcacgggtttacgtttttggcgggaaaatcacggatttacatttttggcgggaaaatcacgggtttatgtttttggcgggaaaatcacggatttacgtttttggcgagataatcacgggtttacgtttttggcgggcaaacacgggtttacgtttttggcgggaaaacacgggttacgtttttggcgggaaaatcacgggttatgtttttggcgggaa

SEQ ID NO: 49060 - DNA, 810 bp, Arabidopsis thaliana
aatgcatctacgcagaaattaccggtcagtagtaaagcatgattccatcctacagcaacttctctgaaagatagaggtgaaggcaagctctgaggggcatgaacatcagggccgccgcagaatcctcttccccaactgaagaactgtccatcagctggtcagacaaatcagaaggcggacaggttaacataagatacacataattcgattgatcaatgaaacggaacacgagagttaagggtttaccggatatagctgcactatgatctccattagctgatatacgaacaacctcaacatcttttaatccagagacaacacaaggaagatttactgattttattctgtctgatgagaaacctaactgtccacgttttccagatccaaatccacacacttgattccctgaagaacacaagataattcaaatggagaaaaacacttttctcgcaaaccagtgttgtatatgagatgttacctgcaaacaaaacaagtgagtggcgcataccacaagctaccatcttcacactgtcattgttaaagtgagagactttagctggagtgcttaatgacaaggtatcaccatgaccaagctgcccaaacgagccattgccacatgtgaaaatacaaccagaatctacactcacacaagaacacaaaccggagatagatcaagctcttggtcttaaatcagttacaaaaatctattaatgtttcctgaaacaaaaccagaatgactccatccagcagcagcttgagtaatacagagtcgcaaagaaagatcaagctttggcaaagtatgttgaggat

SEQ ID NO: 49061 - DNA, 524 bp, Arabidopsis thaliana
atcgtctttgcttgcacacccaccagcactgcatcaccccagccctgaaacaacatcatatgtgataagttcagatacccacaatgtagttacaaaagttttggtccgaatgatgtgaagggaggattacatcgtggacacattcaaatgcttgaatcatggcctgaacgcttccggtgcattccacactcctgtccaccccaccatccgtcatctcagcgatcacctgttgaattggcttgtcatggtctttcgggttcacacactcggtcacaccgaattccttagctgccaataacatatcaaattcaatgtaagtgaagggagattatagaagaacatagtcaaaaacagactatcatctttttgaataccttggtcgaatcttttagagttaaaatcaacaccgatgatcctagaagcagcagcgattctagcaccttctgcagcgcctaaaccaacagcaccaagagcaaaaatggcaacactttgacctttctcgggtttaccacattcaaagttgc

SEQ ID NO: 49062 - DNA, 722 bp, Arabidopsis thaliana columbia
tgatcaatcaacaaattctcaaagtcataatcttcgaatccaaaaacaaaaaaaaacaatggaactatcattagcattaacatcaacagaccataatccatcgccttcagaggcacatccagatactatggactttctgtctcgagaatggtgtaatttcgctgttcaatcacttcatccagaccctatcctctacgatcgttccattgttcccgtcgagacatcgatcgccaagtttcaaggcgactcaagtcctgtttcttgtgctgtaagtaaccagagattgttttttgttatattttcttcaattttgttggttagtgtttaatttatgatgattgtaaaagtagatgatggatacgagcatgaagatggacgatccagattttaagccctcgatgccttcatggaaaaccaatgatgtgaaggtataacaaattaggtgtgcaaaatatagtttttaaaataacaaaaatcacagtaacgtttaacattatgatatcatagttttcaacatatattcctcatttttatgttgtctatgtttatttgatgcacattcgaatgaaaattcggtatatatatgatttaaattgtaatacgacagcatattggaattgtagaaattgaaaataaaactgctacgatgatagatgacatatacaattaagtgaagaaagctaagagattaaatattgatactataatttgttgaatgatgt

SEQ ID NO: 49063 - DNA, 750 bp, Arabidopsis thaliana
cctgtcatcatctctgatcaactacgccttgccttcgtcagacgttcttgattggactaagttcaccattcatgttccttctaagaagatccctgagatcaaaaccatactaaagagcatatcctggagacgctacagggtgttgcagagaagggttttgcaggtccagagacatttcgtgatcaacagaccgtcacaaccgtttgatatgcttagaatgcttcttcactctgtttggttgagaagactaaacctgagttggccttagtagtgatactctgttttttttggggaattaatattggtatagaacaataacgtgaactgtagtataacattgaaagtagctacaatggtaaccaaaggtttacaaataataaagactatttaaaactgttttgagactgtttttgtttaatgaattgtatgaatcactcttcataactcaacttggatcagatgaaatcgtttgttctctataggcattttgtctaactcaaaggtgaccaatccagaggaggaatcgtactcgaatgcaatctcatttgactcaacaacgcatctcttaggcttcacagaagagtaagatccgaatttgccacatcctttaacttccattaccactttcatcttctcggctttcatatctaagtccttcgatagctcctcccgaattgtacatgtttactagaccaattggggcaaaagatacaccatcaacaagatgactaatggggctcaccgtgaaga

SEQ ID NO: 49064 - DNA, 523 bp, Arabidopsis thaliana columbia
aggtggttaccattctcagctttataaagcctacgtggttgattctcaaatccatctttgaatcgacaagaaatatgggtgacaaaatatgaaaactgaccagaagatttgcaaccaaccactgcgaaagtttaaatctgaagaacggttgcgagggagaggtgtgaggtagaggtatgttggttagagaggttccagtagtgcgatgagtgaaatatgaaatcatttcttttcctgacatcctagagaacatggaatcagctgatcgttgcagaaggataacgtcttcattctgtttactgcttgtctccgtcactacatcacctctatcaccttgttcagtcccattaaccaaattttcttcatcctctacacaaacatgtggaagagtactgtttggattaccaagtcggttctccgctgatgaacagtcctctaagagtcgtatacccattcttttaaaacgaccgtagatctccaatctccactagttatatgaatatttatatccacatgatcatag

SEQ ID NO: 49065 - DNA, 521 bp, Arabidopsis thaliana columbia
cactattcatcactgtctcctcgctcttcgctctgatcagtttaatggcatccatcactgccttcatcagcttcacaaacatgctgcatagtgtttggattaccatgtcggttcttcgctgatgacagtcctctaagtgtcgtatttaccccatccgtttagtttggacgtagacaccctaatattacttatatgaagtgatatagctgcaaaagaatctagttgtcaataatgcaaaaagaattgagagatgaatagtcattatgttacaattattgcttaatgcttacccgcatgcgcttcgtgcttctctcagtttctacattgatatctccaggctcttcactgtgttcaatctcattaacaagtccttgaagaggtgtataccctttattaccttcttcggcttcagaaacatgtggaagagtactgtttgaataattatcaagtcgagtctccgctgatgaacagtcctctaagagtcgtataccccattgttcaatacactatatcttttgtct

SEQ ID NO: 49066 - DNA, 838 bp, Arabidopsis thaliana columbia
ttatctttgccatggagcgacgaaatgccctctcctaaagctattaagtcttcttaaagtaaaagtgctagagaaacaagccttggctacgtcttttctacaccataaccagattcctctatagctcctttggtctttatgtttagaacctcttgtagatgatcttcttgttctgtgatctttacaatctggatcacatttattaaataattctatcagaaaacaaaatgtttactatatatttcttattgattagccaacgacttgtttattaaaattaccaacatatgaaatctacataaactcaccagaatatatattatgataagtaaagtatgtagtgttgtacattgtgatctaaggatcaagaaatgtttttgttacttacttgttagagttgtggtgggttcatgatcagtacaattgatggaactaggctctgatctccctaacttgaagagccattgaaagatctggtcaaaactcacaaagattaaactcttataaatatagtccttatgttatggacacatgtaaatgatatggagcacatgtgacgatgactaacctccatgttctggccgaagatgcttttttggtataatatagtaatagagcttgtgtgattattcgcttagtcaaacaaaattctcccttacacaaatgattagagactttggaacagaagatgaagacaagagatgacttgggaaactaaagaagatatataagtgtttaaataatttgtttgactcaatctatttttgagtttacatggaaacacaacgtgggattgtaatatagttgggttttatacatacatatgtttccttgggtt

SEQ ID NO: 49067 - DNA, 574 bp, Arabidopsis thaliana columbia
gtgagtatgatgaggagttcagtcgtctaaggaggttcactatgaagaattttggagagcaggatatgattcaaagattcatgaggggactcagggttgatattcgtactcgtacctccattcgagggtgcactagcctcgttgagttagttgaggaggctgctaggttagagataggacttgtggaggaagttatggatctcaagaaggctcaagcaaaggtaacaaaaggagctgaatctcagaagcgcacttgggataatcgtggtgcagtatcagtccaaaatggtcagcattgcgccacaatgtggtaagaggcacagcgggcttgttagagtaagagtgggaattgcttcagttgtggacaagctggtcatatatggtcgaattgtccaggaaaagacaataattgcaggaggtgttggaagccaggtcattttgcaagggattgtagagtgaatttggcagggggacaaccaggaaatctagacagaggaattatgccacaccgccaaagcgcaagcagtgggactcgagtgtatgcatagcaggcgaggaggatgttgatgaggat

SEQ ID NO: 49068 - DNA, 598 bp, Arabidopsis thaliana columbia
caacccccaattcaggttcgtcatcctcctcctcttcaagtctcactctttttccttttcgttttcgaagccgctgtgaaaccagagcttcaactccgacaaaagactctgctacaaaaacagccggcaaagctagaactccaccatcaaactccatctccggtttcaacttcacgtcgtggtggaacatgagcaatgtggacttcgccttccattgctaaggcaatcacaaaacgaattatagataaatcgaagaacaaacacgatttcaccaaagttagaattcgggatttggttttagagaattagggattttgagggaattagggattttgagagaattagggattttgagagaattagggattgagttttcgatttgggaattttgatttgtttcgttagtacaaaacgacgttgttttgtctttaacagaactcattaacgtcggttaacggggttaatcggcgagttaacgtctcgggattttagccgggtcaacattttgtttatgttaaaaaggctggtcaacgtttttatcatgtttaatttagccgactttagagttcacgtattgattggcactttttgaaagtaa

SEQ ID NO: 49069 - DNA, 518 bp, Arabidopsis thaliana columbia
tagaaacaaatgataagcattattctcttctttattgaatcattgaaaacatgcttttaccgatctatactataatcatcgatcggctcatattgttttgtttcaataatagaaaataagtactatgaaccatgagtcgataagtaaacatggttcttaaaaaaaatgtaagaatctctatatctaccttttagaacgtgctgataacgtgttataaccagagaaagagataaaagaaatgagtgtgttattccattgagataaatggttctttatataggagtacaaaaaaaagataaaaccctaaaaacatctagatgatgggtttagatgagggccttataatggacatccatctttattcataacaaaaatcaattataatgaaaatcgaaacatttgtttttttttaggaaaagaccatatttaattaaatgttttggttttcttaaataagttttctatttttttatttatttcccccttttcattataactggttgattttctaatacaat

SEQ ID NO: 49070 - DNA, 384 bp, Arabidopsis thaliana columbia
tcaattgtaattcggtattgtaaagtcttcaccaaaatctaaaatatcaaatgaatttaagaactgaaaaaacttttaaaaataattgaataaagtctaaaatcccatattttattgtaaaatcaagagaactttttaaaacccacacccggccggttcaaccggttcaccgggtcacgggttatttgcgagtttttgtgggttttttcgattttgaacttgttgggttttagcactaaacccaaaccggaaaagtgttcgggtcacaggttaaccggtcgggcgtaaaaacactggttatagctaatattatcgaatgttgacaacaagtaaatgctatgacgaatattttaattaacggcactgtttaagctaatatcacgt

SEQ ID NO: 49071 - DNA, 926 bp, Arabidopsis thaliana
ctctaatcaattcattatagcgagaagtagacgcaaattggaatgtattgaaatctactggattgaattaattgctaaaagtaaaacagtgataaatccaaacaattcctagccttaagaaggcctttactctttttttctcacgatctctcagtgtctcgaggttttttggtttgtgacttttcaaagtaaagtgccatttcaccacaatctctatgtgacttagcaagtttcattgtttcaacccaacccttgtacaaccctccttattaaaaccacattattcaacacttgtctcttaatatattactagccatcaataacaatctcaatcacataaccataaagaaacacctaaaacacttatccgagaatactcttgcaagatcactagagtaataaaagggatttcaacacttgccaagagaaacaaaaaaaggataaattaaaattccaacaagtatgatatcctccaatcaattttactgcgaattaaagcgtttcatgatgatcatactcatatccatgtagcgttgagcacaatgagtgaggcaagaactctcgcttgagctgaacttacttcccggtgcgcttgtgatgcatttgtcccagcacacacttgtcatcttcgacaccatttcgttcaccattgctctttctttctcttgctgccacacaaacacacacccacattctcttacaattcaccaaacataaacccaagacaaaaaaaaatcattactttgcataaaccctaataaacccaattcttgtaaacacatattagtacactaaatctcaattcaacttgattctaatcataccaactaaatcacacatgaaaaaaaaaatcagatctttcaagtttaaagcatcgaaatgttaatttgacccgtcaacgaagattcaaataaatggtttctgtg

SEQ ID NO: 49072 - DNA, 596 bp, Arabidopsis thaliana columbia
gatggatcaaaggccaacctctgtaaaagaggggagtaacgtcctttacgtataaaggaaaagaaaagtatgattctagtaacacatccaaaaatatatacataaggacccttggccttataagtgaatagaatttagggttaagttaaactcataatttgtaagcaaaatgtgtgttgctctattcaacaagcttggtacagttgcattttaccttcttttttgtcaacaagcttgttttccatttgtttgaagcaaaagttaatttacatgtattgttattaataagtgtcactaaagatatttaaattatatttttaatgataaaattatatgttggtagaggacaaggttggtcatgtagccaatatttaaagatagacttggtagacgactttttttagattttagacttttagtagaaaaatgcaatagttgtccttataggcattattgctaatcagaaacaaacaaaaaaatggcaaacgactacatttcctttgttttcaagtcgctgcttctgttaattcacttgtattcttaggtcagcacatgttgattctgcctcagtcgtcaagtctcttcctggttttgaa

SEQ ID NO: 49073 - DNA, 503 bp, Arabidopsis thaliana columbia
  unsure (1)..(503): unsure at all n locations
catattctgcaagatctacatgatctgcaacgcttgaactgcttttaccatttgaagcctaagtttaccctcacaaagattctctttacttcttgtcattaaatgaactgtttgtatcttcacgagattgtcgttatagaaagaaaacctcatccttccccattgttagggatgtcaaaatggctaacccaactcaactcaactcataatcaaatgagtttaatgttaaatgagttatgggttgacccatctcattttgttgggtcaacccataactcatttcatttgatgggttaagttgttacccatttaaataataatttaattaataattattatacacattgactnatgattattatcatcattaattcattatcatcaatctttggatatttacggattcacatttttttacggatttatatttttgacgaaaaaattatgggtttcagtttttattgcgggaactcacgggttacgtctttttcaggaactccggg

SEQ ID NO: 49074 - DNA, 566 bp, Arabidopsis thaliana columbia
tagacggagttgtaggataaatcaaacattacccgaatgatcattgatcaaagaaaggttacataaggaactcaagatcagtttagaagagagtagagattttatcggctaatgctacatatcaagaagattaggatcgactattatcggcaaaggcagttaaggctatcacagaagttattaggactatcaagattcttgtcaatagacctttttgggcaatttggttgatggaaagatcaatttgccgaggaaaataaaggaagtgcggaagactagtttttatcggagaaatctagttttatcgagaaatagtaattttaggccgagacaagcaagcggtgatcgaatgggattggatgcggacacaacaaggtttagtggagtatttaagtgacttagtcattttttagaagaatatataatgatcattgtccgcgtacgatggtcggagagttctcggtacgggcgtatactgtgagtaagcggaacgagtgctcgtggaggggccatgtcgtaagctgcttgtgcactacttgtgtaaggataaggatgggcgttttgat

SEQ ID NO: 49075 - DNA, 565 bp, Arabidopsis thaliana columbia
aggtcgttaaccatcacaaaacggatcaatgataatttttatcaaattgatcttcgaggtaagtataatataagttcgagttttattgtttctgatttatctccttttttgtagatgatacagatttgaggacaaatccatttcaaaagggagggcatgatataactttggtcgaacaagacccggagctcatagccgagtagcagcatctagcgggggaagctttggacgacttaatgggtccgatgactcaatcgaagacaagacttctcaaccaagttgttagcgaattgcttagacgattagaccaacatccaagcgaagttatccaaaccactttgtttttataatagcctaagataattggtaatgggctaagtgttacttgagtactttttcccttctaaggttttgttcacatagttttctttagtaggttattaatgaggcttgagtaacacttccaaatccccattatcaatttggtccaacccttttaaaagaagaagacacgaaaataagaaggccaagagtcgttcaaatttttatttatgttttttgcatt

SEQ ID NO: 49076 - DNA, 588 bp, Arabidopsis thaliana columbia
tcctcaacttctctttcactattccttagttttcttggaaacaactcactcgcttccccacttgccatcacttaagttacatgacctcgttactgaactcggccacaattcttcaactctttcataatcttggttgcggtcctccacaaccatccattctcgatccaatccaaacgcacaactataacaacaacaaaggtaattcctaacccattccccactaactcaggacatacctgtttacctagttgcttttgcgactcatttactcaataaaactttatagaaaacgtgtgtcccgtgagcatcatgaaccacgctctaataccacaaattgtaacgaccccgaatatctctatggccggacaagccaagggcaatccaaaatcgctacgatgatagctcacatagacaacttaacttaggttccaaacggatttagacccttagccggattaccacatgaaccatccctcacgaacgcggtttaggcttttcaaccttgccatgatcgtgagttgtgttagcccggcaagactaatatcgaatgaacacactctttataagaaaataatcttttatacatat

SEQ ID NO: 49077 - DNA, 568 bp, Arabidopsis thaliana columbia
cagaaacatataagtcccgagaggaaacactaacaaggcaatgtttttatatagaaaacaacaagcaagtaccttccccatgtccccgaagattatgacccgttgtaacgagtcttgtccaggataaggagaggacttgaaagtgaaattcttgctccaaactattgatccattcatcaactcatgacccatcctgtatgtgtaccttgaggtagttgatgatccagaaagttacaaaaccgttatccaaacgatgtgtttaaacaagaaaggaaattgatacttctaaacagtgtatatacttgaggtttggccaaagatctttcaatgaagcagtgtggatgaaacctggatcacgccaaccaacagtacgagcaggagcacctgtgtcaaacagtgtagtaagaatcaaaatgcaaattcagataaagagaaaagtgcatagatttctagtttcatacataccacacatgctgttcctggtaaaagtcaaggtaccagctggcgatcgtctacttcgagttccttacgactccattcacaaaacggacagcctcactatgttgta

SEQ ID NO: 49078 - DNA, 612 bp, Arabidopsis thaliana columbia
ttataaaagcggcatacaaaattatttattgagtttgtacattagaaatctttggttatttagattagatgggatctatttatgcgggttttcccataaaatctatgcttatataataattaaataaaaacatatggtcaaagtatagttgttcctcatacttttgaaaaatgttatgtacgtacatgtataataatgtacgtacatctttgttgatgagttaaaattgttgagatatattgattgatataataataaatcaatattggcgatgggggaggtatattctacggtagtcctactggagatgaagacattgttatttgcaggaaaaaaattgtttgtaaacatactcacaacttacaatgtctctcatgccatactaatttatattttttaattgtcatcttcaacgccctcttcgtcatccccagcctcattatgttcgtcctctttattgtcctcgacttcttcttcctcatctaatcctcattgttttcaaatacattaggtacctaaaatatgtttttgttgtattttcactccacccacggttagtttcatcacaaggtccacatcatgcacataatatcacactatcagattggcaag

SEQ ID NO: 49079 - DNA, 564 bp, Arabidopsis thaliana
atgtctagtcgatttctggacgcattcgattatagaagagaatcctccaccgcctcactccaaagataaagagattagttgtgtgctcgttgactttatgtttgcctcacaagacgcgtccacgtcatcactcctctgggcagtggtgatgcttgagtcggagccggaagtgctaagaagagtgagggaggacgttgcaagattttggtcgtcggagtccaacgagttgatcacagccgatcagcttgcggagatgaagtacactcgggctgtggcgcgtgaggtcttaagataccgaccaccagcaagtatgattccacatgttgctgttagtgacttccgtctcacggaatcgtacacaatcccaaaaggtacaattgtgtttcctccctttttgacgcctcgtttcaagggtttactgaaccagaccggttcgatcctgaccggtttagcgagacaaggcaagaggatgaggtgtcaaacgtaatttctaacttttggaaatggctccaccagtgtgtgggcaacgttacgcgatgaaccactcgtggcttcattgccatg

SEQ ID NO: 49080 - DNA, 683 bp, Arabidopsis thaliana
tcgactaaattcgatcacaacttgcttcccaccaatctctttaccattcattcgatcaaacgctctcgccgcgtctctcacatcataaaactcaacgaacctttgatgttttttgtacggtgtctctctcaactctttgatcggacctgaaacatagattctcacataaacaaacggtccaatataatctatattcaaaagctaaagatgtttcatagcatgcaaacaatgaatccatgattcatgtaaataataatgtaatttataccatagcttaacattttaaagtctttgtaaaatgttttaattcctgacatatccacaaatcgaggaaacaaagtaaactaaatcaagacatagaaattagaaaaaaaaaaaaaagaacagtaccgtaaacttggaaaatctgtctgagagtaatggaagagacctcagggtctaagttaaatattactaacgttccttggttacaacctccgggaacggcactagtcgccggaactacgaactgagcccacacaggtctaccggaaacaaacccacgcgccgatgaagtagaaggtgagctccagacgcttccacctctagcttgttgctgcatgtgtctaccacaaacttcacgtaccgctcttttagcgtcacgtatatcgtagaaatggacggtcacgattccttcagagatt

SEQ ID NO: 49081 - DNA, 511 bp, Arabidopsis thaliana columbia
ggagtctgtaccggcataaaaagatccagtgtctggccaatcacgctcatggttgccactgcagtgaagaaaaggataacttaaagcactgcaagagtagagagtagaagcacaatgttgtagattttcttgttgactaacctggcgatcatgtagggtacagtagaagcaatgggctggacttgagctgtgaactgatcccactgggagagatacccattggaataagtgagatctccaatgtggaaaacaatgtcaatgtccttcaagtccttgatgacttggtctgttgtgttgagggaccaggctggtaatcattgtactcattcgagccatctcgctcaccctgaaacatatttcaatcaaggaaaatcattttagatattagtctgagagcgcatggagatcataatggcctaaaagagacgataccatacctttcccatgtcaccaaatattatgacccgttgtttcgagtcttgtccaggataaggagaggaccaaaggtgta

SEQ ID NO: 49082 - DNA, 602 bp, Arabidopsis thaliana columbia
gttcagtgcttaagctgctcctttgttcagtattacaacaggctgctaataagattgctccctttcggtaagtttgttttcagccaactatctctctttgtgaagttaacaatccgttgcttcttgtgatggttaagattcctctggtatgcttagtttctgtgctagtttctagactatgatgagtcagtataagatatctatttcttctgtttttggtgtatcttcatttgttcttgctttggttctgctgctacatgattgttttgaagttttgatattaagcgatggttttggtcttgcaatgttccctttttggcaaaaaagtagtatttataaacctcattcagtgtttctaactttctcgatgcgtgagtagcttacacagtgcttaacaagatggctggtgtaaagcgaaaattaagtaccgagtcagatgttcatgctcttcacaaagaactggatgaggtttcatgtcctgtttgcatggatccccacataatgctgttctactgctgtgcactctcatgacaaaggttgcaggtcctacatctgtgataccagttaccgacattccaattgcattgactggtttaagaaat

SEQ ID NO: 49083 - DNA, 725 bp, Arabidopsis thaliana
atcactgtgttcactggagacaacacaaaacaaatatggtgagacatgcaaaacaaagacaagtcttctcaaattcaataagacaagaacactcgtggccactcacttcgagagacacatcacgaaaagtgataaattcacactggtttctttgaccaccaagaataaatttaagaaaaatccaaaaaatttaggaaaagttgggatactttgcgacgcgcctagacaagaacacggtgcacccatccttgggcgatatagtagggcagtacacgatctcatcacaaccgtctgatcgaagcctcttgaaatccaacaacgacgagaacattgcaatgaagagtacgaggtggttcaacgcgtaacgctggcctacgcattggtgaggcccccatccaaaagctaggaagttgcgtttgaacacctggtcctcttgtcttgtctcgctaaaccggtcaggatcaaaccggtccggttcagtaaacccttggaacgaggagtcgaaaaccgaaggaaagacaattgtaccttttgggatagtgtacgtttccgtgagagggaagtctatagcagcgacgtgtgggaccatagttgcaggaggcctgtatctaatgacctcacgcgccacggagcgtgtatacttcatctctgcgagctgatcaacggtgatcaaggcgttggactcaggtgaccagatcttggctacttcttctcttactctgttc

SEQ ID NO: 49084 - DNA, 501 bp, Arabidopsis thaliana
gttaatgaaaaataacgatgataaacatagaagagaagttgagtttgatacacggaatagggtgttcttgaagctaagaccatatcgtcaaaattctgtgacaaagagagtgtgtcagaagttggcagcgaagtattttggtccgtttgagatcatggaacgcattgggaaagttgcttataggctgaaacttccagagggttctaaaatacaccttgtttttcatgtgtctcagttgaaacaggttttgggtgaccaccatcaagtcattccattaccggaagtgttgactgcagataatgagtttgtggttgtgcctgaagctgtgctggagactcgttacaatgaggatggactcttagaagcgttggtacattggcaaggtcttccggttcatgaggatacatgggagatagccaaggacttgaagaaacagtttccaggtttagcgcttcaggacaagctgcatgttgaagggggggggggggagggggtattgat

SEQ ID NO: 49085 - DNA, 1381 bp, Arabidopsis thaliana
gggcaaataagctgcgtttttgacattattgtattgcaaaccaattgatgaccaaagtttgtataccactccttgtatgtttgaagcaatgattttgcagagaagaaatctattacttgttccttttctctttgtcaaatccatgtttggcatctcaaaacctcccatgtgcgcctcattgttctcaagagattcacttacgggagaagactttccattgattagctaagtaggatacaagatatcagagttagataaacccaacttagtacccaatggcacaagattgcttgattgatcgaagagagtaactcatgcttaatttccagagtttgaatacaacgtgaaggacaaaaagcacacatcaagtctcactaaaaagcacatgatttgtcgacaactttcaaagactctgcaaaacaccaaatgcacaacaaaatgatgcagataaaaattatactaaaaaaacacgcttaacacgactctaaccagtcccttgcattctggaacatcttcaaccacgggctcgggccagctttctcaacgtcccagcttgttgggtaccatggaaactgccacatcaagaaacaacgttcaggatgaggcatcatcgccaaatgtctcccatcaggtgaacatatagccgctattcccaacggtgaaccattgaggttaaaagggtacgcttcagtcacgttcccatcatcatcacagtatctcaatggtgccaaatctgagtgaagcatatggtccaagactccttcgtccgggaaataagcccgtccttctccgtgcgccgcccaaacccctaaagtacttccctccattcctttcagcattatcgatggcgagtcctttatggtcacgcttgtgaacctgcactcaaaccttcctgattcgttgtgaacaaacctcggctgcgaggtgtcaagtgacccgccaacttgaggacctggaacccatcctaacagagccattaactgacatccattgcagattccaagactgaacgtgtctggtcttttgtagaactcctgaaattgactcaacacaggctcgttgaaccttattgaagcagcccatcctttggctgagtcgagaacatccgcataactgaaccctcccacaaacacaataccgcggaactgatcaagggtgatgtctccagctagaagatcagacactgtcacgtcccaaggttcaaaaccggcagcgtaaaatgcagctgacatttctctgtctccattgctgccttcttctcggatcactgctacttttggcttaacatctgagagcatatacaataaacaaacattttcattagaaaatatacgctatataaataattaaagataaaaaaaaacctcatagagagcgatca

SEQ ID NO: 49086 - DNA, 495 bp, Arabidopsis thaliana
  unsure (1)..(495): unsure at all n locations
ccttctactgatgttccctcttatttgacatgaatcacatttcgagataaattcctgagcatccttaaacattgatggccaccaaaaaccagcttgcaggattttcgacactgtcttgaacgttgcaaagtggccaccataggcagacccatggcaatgcaatangggtgccttcgatttcgtcttctgagacacatctcctgtagatcttatctttgcagagtgtgtagagataaggttcgtcccagtagaaatggttaatgtccttgaagaacttcttcttctcatagctcgacagattcggaggctcttcaccactaaccaagtagttgacgtgatcagcataccacagaagcttttcttcaattgcacatacttgatcgagtgatttccgaatttgagcactctcgttaagttgctgaattgccattagctgttcttctggcatggagtcgtcaatagggactcgtcttcaatcctcatcgtagacagatg

SEQ ID NO: 49087 - DNA, 571 bp, Arabidopsis thaliana columbia
gataaatattctgtatagcaaaacatttctagagctatgcataagaaataccttgctatatgagaattcggagggatcatttagactgaggcaaattgtggttgtggtaattgttcgatatgagatggttatttatagtggatcatttagacgttagaatgttctagatattttaatttaggtaatattctgataatccaatatcctgagaatatatgcttgttattagtttacaaatctaaacaaaaaacaatacccaagtgttaatgtggttaccttttttgtagggaaattttgccaaaagatatattaacaatgattgacgaaaattaacgaaaaattgaactcaaaatttgaaaaaatataaattagttatggaagatgctaaagattaccatttttgtaggaaagaaatcgatcacatttatgtttttagatatgacattaaaatattattacagttttttctagaattcaaataggaaaccatttgatttgaaaatagttgtttgttatactacatatacgatttatatattttcaaatcaaaaactaaatattgtttaaatat

SEQ ID NO: 49088 - DNA, 590 bp, Arabidopsis thaliana
tctaggatatccccattacatttctttctctctctttctttcttctcctttcttctctctttttcttctctccttctctgccgagttctcgaacaacagtgctgacgaacattcacgacgaacctccgccgacgccgaccaccgaatctttcgcatcagctgccggatccaagttctctgacatccgtttaagctccagctgtaagttttgggttggattgaaataaattagggttttgattttcccacttttgcatcgaattatggtttgcaatgaattagggttgccgtttatgatagtttgatatctagggttagatttttgattttcttaaagatctagtttggattttagggtttagattttggaatttatcccctttgattttcatgtgtttggctacagcaaataatgccgtttagttattggtcaccttcttcatcagagaaacgatccatcgatgatccttacaaatacgatggtgattttggtgtcccacaaactgtttttttggtaacaactttacctttcagagcgtattattggcaacaaaagaagacattctcaaatgccaatgagtggcaagatg

SEQ ID NO: 49089 - DNA, 565 bp, Arabidopsis thaliana
ggtacaatatcatgactagcaacaactccgaggcaatgaacaatgtcttaaggaaggcaaaagcgtatcgaattgtctatatgctagagttcatccgagaggtcatcatgcaatggtttgcagcaaggcggaaaaaagtgtcgaagtgtaactctttggtcaccccggaggtagatgaacgtttccttcaaggcttgcctgcgtcaggaaagttctcagtcatgatgtctgggccatggagttatcaagttacttcagagactggtgagcattttcacgttgtgctagatgagtgtacgtgtacttgtcttaggtacacaattttaagaatcccatgcgagcatgctctagctactgcaatacattttggcatcaacccgaaggctgttgttggattgtggtatagccttcaagtgttttctgattctttccaagaacccgttttacctataccggacccaaaagacgttgttatcctcaagagttatcggacctgattctcatacctccacgcagcagacgaccacttgggagaccaccaccaaaaggatacatctactaggga

SEQ ID NO: 49090 - DNA, 885 bp, Arabidopsis thaliana
ggtaagaaacttactaaatcgattacagcgtaatacctaaaatcctactccagttataaccaaaacttttcttatctttgcagtcacgtccatacctcaaggatcagaagaagtttggacatttagtggatccgtctctacgaggaaaatacccaagacggtgtttaaactatgcgattgcgattattgcaatgtgtcttaatgaagaagctcattatcgaccgttcataggtgacatagttgtggcactagagtacttagccgcacagagcagatctcatgaagctcgaaacgtctcatcaccgtcaccagagatttcaagaacgccgcgacgagacttgtaaaaactcaaaaacagcttttaagaatttcagtttggtgttgtgtaaaaatggttttttttgtttctttctcagaaaacaatatatgtttggtaaatgtttcgttattagtctcttttacttgatgtatatggcaattatggaaacaattaaagttcttttatatgtgtatctacatttgaaaaccacattcgaaaggaatttcagaagaaaaaaacaacaacttcaatttctcaggaagataggatctttacatgttcttctcttcttgtctctggtgcgtttttaaaaacaaaacccaaagcacctctcctagtaatctttcaaaaaaaccaaagataaaattatgaacaattataacagaacacaaaggtattactatcttttgtgtcatgtcctaaaacgcttctttttctttcttctttctctgatttaaggtcagtgccataaactgtattcagtagctgaagaacgttcagggaaatgatgagaagaagcctgaagcaaaagcttaatggtatgactcggtgtagtctgcagacat

SEQ ID NO: 49091 - DNA, 544 bp, Arabidopsis thaliana columbia
taatgaagtttgaacttctttctacttctctttcaaatctctccatctctttctcttcctctttttcttcttctttggtttcttcgtttcattttttttttctttttttcttaaaactaaaccatagaaactaaaccgaaaccaactgctgtggggtttggttgatcccattaagggtattttggtctaaaaaccatttaaaagacaaatggtgaaaaccacatctcactttgccaaatcaggagagcaattttttttttagccacttctgtgaaaatttctttaaaaattatagtgtgaaatagttaaactaagtccttcttttttttttttggtttaatgttaaactaactaagtccttcttgcgacatcataagtttaatatagaggtgtcgaattaaacttaggatgtctccctttagatgcagcaacatctacaaaacaagatactcaacgaactggcaagcactattgcactaattatctccgtctccagtcaatggcatgatcaagtcgatcgagagctttattgctcgttatgttt

SEQ ID NO: 49092 - DNA, 415 bp, Arabidopsis thaliana
cgaagagatagcgatccgccaaagttgtattctcaagataatctttccccttgagatagtcgtggtcaatgaacttggggaacatgtcagaggttccaaattccatccccacagctcccagtattggcgttaagagaccaccaacacaaaggcttccgcgaattcccgagcgatggatagttgcagcatactctctgtagcttaataggtgatcaatagaacaacgctcagcgaggtgtctgctctatcacctgccatcttcctcccatctgttgtctctcttagaatgaagaccaaagagtggtctatcatgcatagctcctcttgaccagccaatccggtggctttctttgcacagagggtgttggcgatgcacttggtggacgtatctaatcacgggatgtcgaattgaaga

SEQ ID NO: 49093 - DNA, 569 bp, Arabidopsis thaliana columbia
atggttcttgcttaatgaatgttaaagggaatatgctgatttgaatgcttgaatagactaagtgaaagattaggttgtgttgtgaagaagatggctaaagtttttaagtagagatcattcaacctagcactctagaactagcaacatggacattgagactatctattttacatgcatattttggttctgaatccccaccttcaaacctcactcctagcctagttctattgttgcttgaggacaagcaaagagctaagtttgggggtgttgataacactagattttaacctttttaagcccttgtttttcatgcatttagtttagtttcaagtctctttttatgcattcttagtctcttttccttcttttgcacattttgcattgcattgcatagcatacttgcatttggagtgttttgcagatgaattaggtacttttggactcaacttggaggtttctagcacaagggatggacagactcgagttcgggggactaaggaaggatttgaagtatactcggcctatgtactcggttggaggccgagtggagcacacgtgaagacaaggag

SEQ ID NO: 49094 - DNA, 566 bp, Arabidopsis thaliana
agagagtgaagaagaagagagtgaagaagaagagaaagaagaagaagagaaagaagaagaagagaaagaagaagagggaaatgttaccggaggagagtcctccaatgatagtagtacaaccttgggcgaagagtactcctccgataagaatatgaatgatgagactgcagtggaaaatcaagtggaaattccggcgtcaatggtaagtatttctcaagtatttgaatggtatgaaactagtagaacaggataatactatgatttctggagaatactgtcattactaggatataactatgtgtatgaattttgggtaacattggtagtactaagatagaactatgtgtatgatttctggataatactgtcattactaggatatacctatgcgtttctgggtaatactgtcattactagaaaacaactacgtgtatgatttctcggtaatactgtcagtactaggatagtactatgtgtatgattctaggtaacatcggtagtaatatgaatgaatgtctgttgcaggagatcgacgaagaaacaaaagcaatactaccgctgagtat

SEQ ID NO: 49095 - DNA, 542 bp, Arabidopsis thaliana
tgacacccttttttatttttctttctaatctgaataaaattctataaaaacaaaaatcctaagttaaactcaaatgaatgaaataatgaaaaagaggaatacttactagtgggttgcctcccactaagcgcttgtttatagtcaatagcttgactttgcaattgcttaatcaacaggtgggtcttgaagatccaaaggcttttctactggaatctcggcttcagcccaatagtgtttgactctctgtccattcacatcaaatgatcttccattgttatctgtaaaaatgatggttccatatggcctaaccgaatggactatgtagggacctgaccaacgagaagacaattttccatgaaacaatgtcaatctagaatcataaagaagtacctggtcattaggctcaaaggttcgagtgaggatcttcttgtcgtggtaagcctttgtgcattccttgtagagcctttgagttgtcatatgcatgaattcgtatctcatcaagctcattcaactgtatatgtccctttctcagctgatttgat

SEQ ID NO: 49096 - DNA, 1066 bp, Arabidopsis thaliana columbia
gacccattccctcacacgcacatacacaaacgcacgtgtatacatgtttttgtgtcactgtgtctgtgtatatattactcagctctggagtatgatgcttctgtagttcagtttacttgtgtccaaatgtcaaaacctctcaagttccttctttggtcatctcttgctctcttgcttcttcaaataggtaaattcaaagcttaaaaacttttcattgtaattttacatatagacatgtgattggggttgtatgtataggttctggggcaatatgtgagggcaaaagcagcgaaccggcggtgaggcagacgcaggtgaagtggagagaaggaaagaagttcagagtcgaggtaatgaacaaatgtcccatgtgtccaatcatcaaccttcgtctgaaatgtcaaggatttcctcagtcgcttgtggaccccacattcctccgtgttctctcctcttccgccggaaactgtgtggttaacgatggcttgccactgagtccaatgcagactctctccttcaactactccaacacacaccagtttgctctgcgacctctttcttggtcttttcagtgcgagtaaatcaataaattagttaaatcaataaaatggtcatcatcaatctgctgggtttcttcgtattatctatatatcagacctttttctttaccattttagcaaaatgttgaatctatgtacaaaagataaactataaggagtctctaaaggaggaaaagagtcatgaggagaagtaaagaaaatagaagacacatagaggtatccaaaggtaatgcagaagagataaaatgtgagcctactagatgaactgttcctgtgccttcgtcttttacttttatgcttgatgagcctgcaaagacagataaaacaaagataaaatagttttaaattcgaaatctttcccactcacaatgagacatgaatcgtttgagtgtatgaatatagcacttacagttgtattcagtccacccaatgagctgattttcgagatcgtagagaacaagcttgtttgaaagcaccaaatctgcaaaagagaatgtaagatattg

SEQ ID NO: 49097 - DNA, 614 bp, Arabidopsis thaliana
tgacacaggttctggggatatatcttctcggtgtttcaaaatctcctaatgttctggtgacccctgtagatgacgaattcatggatgcattacacgatgcagaagaaaaaatagcaagaagtggtgggctgaaatctaacgaagaagtaattgttgatgatgaagatgacatattcgtggatgacttatttgtggacaacaaaacagaggaaacagaagacgggatagatatttctgatgatactatgccctgtggcggatatgataaagagttctggggtaattttctgtcggatgattatggtggctcaaatgctgaagagttgatgtctaagggtggagtagatgcaaggtacaagggaaaaaataataaagacgggagttttgagggtttaaatgataaggtaggcaccagtgaggataaagttgttcagtgcacaggtagtggtgtctttgaccacgctgtgtttgtgagtggtggaggttcaggtgtaaacgcagagaaggttaaaaaggaatgggctgcgaaaactaaggttgcacttaatcttgggagctctcacggattgagaggtgatcaaggcagttggaggaaattgatgatgaggagttga

SEQ ID NO: 49098 - DNA, 659 bp, Arabidopsis thaliana
gaggatcagaggactcccaaaaattaaaaacaaaacaaaacaaaataaaatcaaaactaacaaaaaggaaaaaaaaaaaaaaaaaagtatctcaccggaaacgatttcttcgccgattccaagacttttcttcctaagctttttaacagatccggtgaaaatttcaaaatccgaagaattctctaaagctagggtttcttaattcacgagacggaggtgatataattcccccccgtcgtagctatgatgatttcgagaggtttgtttggttggtctccgccgcatatacaaccgttaactcctgtttctgaagtttccgagcctcctgagtctccatctccttaccttgatcctggtgctgagcacggtggtacaggaacagcggcgcaacgggatgatgaggaggaaatggaggagccggaggagatggagcctcctcctgctgctgttcctttctctcagctatttgcttgcgctgaccgctttgattgggtgcttatgattgttggctctgttgctgctgctgctcatggtactgcgcttattgtctacttgcattacttcgccaagattgttgatgttcttgctttctctaatgattctagtcagcagagatctgaacaccagtttgaccgactcgtccaggttagtgaaacttc

SEQ ID NO: 49099 - DNA, 1196 bp, Arabidopsis thaliana
cacggcttcgaccgaagagggtatgggtactaacatgaacgcgaccagcaaagccgttcttgattactgcaagagagtattgatgtacgctcttgaggatcttgagaccattgttgaagagatgggtgaggatcttcagcagagtggaactaagcttgaccagctcaaacaatggttaactggagttttcaactaccaaaccgattgtcttgacgacatcgaggaagttgagctaaagaagatcatgggtgaaggaatctctaactccaaggttttgaccagtaacgctatcgatatcttccattccgttgttaccgcgatggcccaaatgggtgtcaaagtcgacgatatgaagaacataaccatgggagccggagccggtggagctgcacgtcgccttcttgaagacaacgactctaagggactccccaaatggttttctggtaaagacaggaagcttatggctaaggccggacgtggcgctccagctggcggtgatgatggtatcggtgaaggcggtggtggtggcggtaagatcaaggcgactcatgtagtggctaaggatggaagtggacagtttaagaccatttctgaggcggttatggcttgcccggataaaaaccctggaaggtgcattatccatatcaaggctggtatctacaatgaacaagtcagaatccctaagaagaagaacaacattttcatgttcggtgatggtgctacacaaaccatcattacctttgacagaagtgttaaacttagcccaggaaccactacttcactcagtggcaccgttcgtaagtcccacaaaacattatgttttacattgctacataatcggccaaggtactaacatttaatatgtacatgcagaggtcgaatctgagggattcatggcgaaatggattgggtttaagaacactgctggtccattgggacaccaagcggtcgcactccgtgtgaacggagaccgtgcggtcatattcaactgtagattcgacggttaccaagacacactctacgtcaacaacggacgtcaattctacaggaacattgttgtatccggtacagtggatttcatcttcggaaaatccgcaactgtgatccaaaactctctcatcctcgtccgaaagggaagccccggacaatccaactacgttacggctgacggtaatgaaaagggtgcagcgatgaag

SEQ ID NO: 49100 - DNA, 805 bp, Arabidopsis thaliana
gtcaatgtttatgtcttgtcgttagatagaaaatacacacaagtgagctgaagaatataacatagatgatagatttagtgatccggaataagagatgaaggatacaaaaccttaagaatggcaggtgacaatgaactaggccctcttgccgatgactttgcgactttacttgctacactttcgccaattattgtcttgtatgggcttatcttaattttcattgagctgcaagaaaacagcaattcagattctcatatgcaagaagatgagatattaatttgaccgagcaaagtttgtaaaagataaataacctcctagtttggatgtaggtgtatagctcggatccaacttccatatccaagtagatacaaggaaagtttacgggacattcaactctactatcacccggatttctcacataaattagaccgataccaccgtttttctgaacaacatccggtgtcagcggacgaacgggacccatcgagaagtgcattataactttaccctttgtaatttgatcaacattactatgatcaccagtacaaatcacatctgtgaagctaatttctggtcctgtgtacagactctgaccctgaaaaacaggtcatggaaaggcaactttaccatgaatcacaagctttggatcattcgagatttaaaagttaaaatgtattatatcttgtatataccagatatgttttattgttttcgagtgtgatcaatgtggagaaagaccggtcaagggtagtcgcagccacggttaatatccatggagaaacgttaataaccgatgaagagcggg

SEQ ID NO: 49101 - DNA, 777 bp, Arabidopsis thaliana
tgaacatgttttagatggcagataggctctttcggtgctataacgagaatcaaaaatatcgtagccaagcgagaagatcttttgaaggttgcatctgcaggacctttggctggcttttctctaggcttgattctgtttcttatagggttattcgtgcctcccagtgacggcattggcgttgtagttgatgcatcagtgtttcacgagtccttccttgctggtggtattggtaagctttagctctcaatcaaatatgataaagtgttgcaggctgaagctggagagttgatcaatgtttaaattttgtttctttttctcttatagcaaagctcctactaggtgatgcactcaaagaaggaacttcaatatctcttaacccacttgtgatctgggcatgggctggacttctcatcaatggcattaacagtatccctgcgggggagctcgatgggggcaaaatagctttctccatttggggaagaaaggtaacactaattagaatgacttaaaaagcttaacaatgtcttatactattcgtctttgtgttcgagtccattccccatagtagattgattaggtagtaatcagaattatatatgtctcctaatgatttcagaccgcaacacggctcacgggtgcatccatagcgcttttgggcttatcggcgttgttcagcgacgtggcattctactgggtggttctgatattcttcctgcagcgtggaccgaattgcccgctggctgaagaaatcacggtgcctgatgataagtatgtgtc

SEQ ID NO: 49102 - DNA, 1250 bp, Arabidopsis thaliana
cttcaacctaaaagaaaaacgggattcattgatggacaattcaaaagccggcaagtgacagtcctgattttgagaattggaaaacagtcaactccatgatcgtgggttggattcgagtttcaattgagccgaaagttaaatccacggtgacttttatctctgatgcacatcttctttgggacgaattgcgtcagcgtttctctgtcaccaacaacgtacgggttcaccagattaaagctcaactcgcctcatgccgacaagaaggacaaacagtgattgattactatggcagattgtgtaatctttgggatgaattaaagaactatcaagcaagtgcagtttgtcctcatggttcggtgttaactgcaattgtcaaagaaagagacgatgaaaagcttcatcaatttgttttgggtcttgactctgcaaggttcagtggactttgcacaaacctaatcaacatggatcctttgccatcgcttggggtcgcttattctcaagtcataagagaagaacagagaattcatgcttctcggactcaagaacaacgtcaagaagtagtgggttttgtcgctcgacatgagcaatcttccgctatgtcatctcctgctcagtcctccattgaatcttccattgtcaagtctcgacctgttctctgctctcactgtggacgaacagggcatgaaaagaaggactgttggtccattgtgggttttcccgattggtggacagaacgtaatgggaatggtcgtggctcgggtcgtggacgtggcggaagaggtgctggacgtggtaaaggacaaatagttgcagctcatgcaaccagctccaatccgtctcctcatacagagtttacaccagaccaacttcgagctctttctcagctaattcaagaacaaacatccaacaaaagttcagataagtaagataaagttgggcgatgttattcttgataccggagcttcctatcatatgactggaagactctctctcttgactaacattgtttctataccaccatgctcggtggggtttgcggatggaagtaaaacttctgcagtaaacatgggggttttacctctttcagagaatattttactcaccaacgttctctatgtgccgacgttgacttgcactttgatttctgtctctaaaattgttaaacagacgaagtgtatggcaacgtttactgatgcaatttgtgatttacaggaccgttttggggaaacgaagagagcacacaagaagac

SEQ ID NO: 49103 - DNA, 546 bp, Arabidopsis thaliana columbia
ctctagagtgccgagataacaacattttaataacgcatccatttattcgtgaattgtgagattaatgccctctgcatgcttattgtgacatattcatttacaggcaaacagcattgaagaggccatacctatgctaaataaacacgatgatctgactcggatgtcacatctacaggtctgatccgacaccatcttctatatagcagatgacaaaataatccattttgataactattcaaggaacagtttctaactactcatacagaatatcccaaaatataatcaaaagaaaagatgaaaagcggactaaaagtgatggttccctctggtagggcgacatacatggttacgtttacgagcatgatcttcgttgtggtgttgtgtcctacatgcgtatccataccaacaatcttccctagccgctacatccgctggcaaatgatttctcggcagtgttatccggaaccagtataaaaggaatcccccagcttatcataacaatcactacatgtataaaacacaatcgaaagaacttaagagacctta

SEQ ID NO: 49104 - DNA, 472 bp, Arabidopsis thaliana columbia
tagaggatcagagaatccctgtcaacggaggaatccatttagaaagatcttctcttaagagtctccactaggtttttctcccaagaacagaaatataataattgttaggtctaaacaatgaccttagaatctatatatatatatatatagatttctaaaacatgatgggccttctttaaaattaagaaaaggttctgtgccgaatctgcaaaacttcggcctagagaagtccataacgctttcaagtttacaaaagtgcaaatttgctctagaagactttcttatttgcattattagtccctgaacactcatcagcgcatatatatagttttagaggtcattgtttagacctatcaagcttgttatcaagttttctttcagagacataagctattgatcccctgttttcagagattcattcagattccaatacagtgaagagatcctttctaactcttttctttattgttgt

SEQ ID NO: 49105 - DNA, 413 bp, Arabidopsis thaliana
cgtgagcatcaaggactcgatggtaaaaactttcatttggaaaaacattatatgtcgacacggtgtcccatacgagatagttacagacaatagaccacaattaatttcacacgaattcgaagctttctattcagattggggaatcaaagttagttactctactccacggtaccggcaaggaaatggtcaagccgaagccgcgaacaagacaatcctaaacaatctagaaaagcgacgagctccaacccgttttatgggcttaccgcacaactactaggcgttctactggggaaactccattttctttggtatacatgatggaggcattggttccgactgagctcaaaatgcctggactttgccgaatagaggaaaactgtgcgatgctcgatgattcgatagatactatcaat

SEQ ID NO: 49106 - DNA, 506 bp, Arabidopsis thaliana
tccacccaaacgatcaagagaaaactaccttcacttgtccttatgggacctttgcttacaagcgaatgcttttgggctttgcaacgcacctgctacttttcagcggtgtatgacttctattttctccgatttgatagaggagacggtcgaggtattcatggatgatttttccgtgtatggtcctccttctcctcctgtttgttaaatttgtgcagggtactcaagaggtgtgaggaaaccaatctggtactgaactgggagaaatgccacttcatggtgagagaaggaattgtcttggggcacagaatctcagagaaagggatagaagttgataaggctaaggtcgatgttatgatgcaattacagccaccaaagactgtgaaggacatcaagagttttcttgggcatcaggcttttatagaagattcatcaaagacttctccaagctggctaggcactcactagactactgtgcaaagaggcaaaattcatatttgatgaagaat

SEQ ID NO: 49107 - DNA, 977 bp, Arabidopsis thaliana
tcaaattcttctctggtaatatattaaagcttttgatcgtaccatgaaatgtgtttttgaggattttggatgatcagatcagcctactaacttcttctttccattgttttttctttttcttgtagacgtgcttgctcttggtgatttttggtatcgtgctcatgattgttattatagtgctcgcagtttgatttccccaagctcataaaagcatggacaagtgcttcatcatcaatcaagaagcatcaatgagtatatgtttgtcacgactctctttgttcctacaatttagtctgttggactattggtctcttgtttcttgttatcgagtatatagagtagttcactttggtttgatttggcttgtgtttgctgagtcttggttctgaaggagagagtgttactgctttgtctctgtaatataacttggttctgaaggaaaatcctctgtttgtgttcttaaatgtgaaatttctggtttcgattagctaaagctatggcgaatcttcaaaagtacaaagcttgagtcaataaattttagtcatatgttgtcagaacaaagtttgaacaaaacaaaatcatctagaaaaaagtaggccttgattgagataacaagcagctgtaggatccttaaggcatccacagaacgcctcttcatctttcggaaacgactttggcaatggatgatcaggagttacaccgacctatacaacaaccagcaacgagtcaagactgtaagaacatgtttgtatgtagtgtagtgtagacacagagggggttactacaggaagaaagtagtttcatactttgtctatatctgtgtgagctggtgtttcatatcgagcaactgttactgccaagcccgaaccatcagaaagctcaaaaaccgactgtatcttgctgcaaaatgcgttaaagtctcaggaattttacggttcggtctctgagaagaagaataaaaaatagcgccattttgt

SEQ ID NO: 49108 - DNA, 452 bp, Arabidopsis thaliana
tcagcagttcacaataagatatataaaagattagattattttaatcatagtgactagagtttgggtggaagctagaattattttaattaatctaacaaaaaaattatcttaatttttttttaatctaaccgctaccgcccgcaaccgcaaacatttgcgggaaggagcttttgaaatctggcgatttcgagcggtccaaagcggtatctagcagtttgtatgattgatgccaatcgctaacaaccgctacatcccgtttgcgggtggcagagggagaatcaatcaagcccttagaaagagtttttcgtaaaattgtcaaaacgttttgcatattattctaaattgttagatgttataactaaaatataaaaatacttttgtagagtcattttaaaattgcatacgatttttattatattaactatttactaatcttttgtttgatgccaaat

SEQ ID NO: 49109 - DNA, 502 bp, Arabidopsis thaliana columbia
ccacaacatcggcacaaaatcctgcatacgtgtatacatgttctccacacgtatgctaccacacacacgtacgtgcacacccacaccacacgtacgtacacaactgtgaacacccgagctatagccacaaaggcttataactggaacatcactttaatgcattgtcatgcattacccggcatacgctccgagtcttgtgccatcatataagtgaccattcaggatcaagtcttactaacacaatcacaaaacaaaaaggaaggcagtagattactttaatcatgatggtatcgtgtaaacttagaataccacttagacacaataacctcatgtagtactatatataagtattttaccacacctcaaacaagtataatacaatcaataactaattcacatatttatagttatacataatatagcaaggaaagtatgccctcatagcatatctcatataagtataacaatctaacaaggaaagtatgcctcgaatcatttctta

SEQ ID NO: 49110 - DNA, 500 bp, Arabidopsis thaliana columbia
actaattccagagattcgtggccctgtagcaaggtattggttgcagggagcgttttggctttaacttgttgattcgtaatgcatgttagtttagttctcgtcaatggtgattgagtctgggactaggttaacttgagggtctctgttgcggtggcacttagatttggttaatgaacttgttgtctagggataatttattgagcatgtcaatcacctgtaaactgaggaaacgaaactactcaattaccccatcctcggaaattctttatctgattgaattctttgtttactctactgttgtttactggatcttgtcatctgtagcttagtttctataattctttcctgttactcgacctgatactcgaccaccgagttgtctggcaacagactctgtagtcgagtgtctttgttttttttttgtctgttactcgacctgtcactcgacctgtcactcgacctcacccagtgctctgcatcgagctgtgttggtcgagtgt

SEQ ID NO: 49111 - DNA, 529 bp, Arabidopsis thaliana
catatcacaatgtgacccttgtcagagaaggggaaagatcagcaagcgtaatgagatgcctcagaaatttatactcgaagtcgaagtcttcgattgttgggctatagatttcatgggaccattcccaccttccaacaagaatttgtacatcctagtagctgtggattatgtttccagatgggtagaagctacagctagtctgaagaacgaatcagcggttgtcatgaaactcttcaaatctatcatcttccctcgttttggagtaccacgcatagtcattagtgatggaggtaagcatttcattaacaagattcttgcgaaatttcttttacagtatggagtccagcatcgggttgctaccccctacgatccacaaacaagcggccaagttgaagtttctaacaggcagatcaaagagactcttgagaaatcagtgggtaaagcgaaaaaagagtggtcctacgagttagatgatgcactgtgggcctccaggacaactttcaaaacttccgcttggtaccacaccttt

SEQ ID NO: 49112 - DNA, 465 bp, Arabidopsis thaliana
tcgtaggatgattgccttgctggtgaaggtgcagcatggtgttcccttggttcatatgaagactgtcttggtggtgaaggcagatcaaaatgcataggttcgtgacgagtggatccgcttctcccaaaaggcattttctgtggcattgctgtagttgaggaagaaaagctgatcttgagttggagattgttaaacttcttgttgagtgccgcgagaccgttgtcgtggaacttacaccaacttaggaggaaaccaaggcgcttgtgaatctcctttgagtctttagtttgccttggtgctgagtactcctcaaagtaaaactgttgtgtagcgtaagactcgtccataggttctgcctcattatcagaatgatggattggagcctcatgatcattcactccttccatcggtacagcttcatcacctgaagtatagaggtctccattggtgggcagaactcaatgt

SEQ ID NO: 49113 - DNA, 577 bp, Arabidopsis thaliana
atatccctccattggtcgaaatatgtgaatattcaggttgcactgcttaaacatgtagtttacatcatcatagatgccgagtctctccatggtctcaggatgagggaatcgagttcctaaaaacgcgttgcgcttcagcaacctatagtactcgtttcgagtggcgcacttttctgattccaaatcatcaccccctcctctctccgtttgatcagcgtcctcaggtgaaaccatttcttcctcagagtcttcatctacaagtttcagccttctcccacgggcttctttcctcgggatcgagtgtttttggcaggagagttgaaagtttcttcttcttgcatcgcttcctcctcttggcttgattcgttgtgatcgatctcgaaatttgcttgttctctcctgctcgaccccatggatgatggttcagagagtcctcgagctgctgcatgcaaagaaggtgttggatatctcttcgatggtgagagagctctgttccggatccttgacaagagcgtgcacttgtttgtcattgagacaagaatgggagagactcaaacaaaattcagtaggttaagag

SEQ ID NO: 49114 - DNA, 335 bp, Arabidopsis thaliana
cttttgcaaacagaaaatgatgaagttgtattgctgactacaattgaagatctggtactagacaatccggtagaaagcttaaactcaatcatactcgattacgatgtcggagatgctgaatcagaggatgaattccgatgtaatttatcgtcttcagacgatgatgaaatcgaagatgatgaagagtactaaatgtgtgctttatatgtatattaattttcctatttatttgaaattttttgtttaagaatatatcagataatgtttaattatttgaataaatattatagaaatcttataattatcatgaatacttataaatataaatataaaaa

SEQ ID NO: 49115 - DNA, 514 bp, Arabidopsis thaliana
actaaagtgttttagcttgatggatttagtagttccatctgagaacaccattatatcatcggcaaaacacaagtgtgtgagactcatattacgacaccgaggatgataaccaatccgttttccctcagctgccttgtcaagcatacaagagagaacgttcatacagatgacaaagaggtatggagataaagaacagccctggcgaagaccccgttcactgcggaaaaaacccgagagctctccattcacctgaaccgaaaaagaagcagtacttatgcagagttcaatccaatggataaaaatatctggtaagcacatagcttttagaatatttatcagaaaaggccattgtacagagtcaaaagctttcgagatatcaatcttaagagcactccggctagatattgaatccttatggtaatcttcactagttctgaagctagcaacagattttccgatcacaatcggtctttaataaaagcagattgatttggcgcaatagaggcagggagga

SEQ ID NO: 49116 - DNA, 534 bp, Arabidopsis thaliana
gatgatataatggtgttctcagatggaactactaaatccatcaagggcactcttgaagtttttgataggttcgcggctatgtcagggttaaagataagcttggagaaatcaacagccttcatggcaggaatctctccacgagctaaggaagctattcttcaacagtttccttttgcgttaggtacattaccggttaaatatcttggcctgcctctacttactaagcgaatgtcgcagatggattatcttcctcttgttgagaagatacgaactcgcattacatcctggaccactcggttcttgtcttttgcgggtagattacaactgatcaagtctgttctttctagcatcattaacttttggttctctgtttttcgattccgaaggcttgtcttgttgagatagagaagttgttttcagcttttttgtggtctggtcctgaactcaatgctaagagagctaaagtagcttggtcggaagtgtgtaagccaaaaaaagaaggagggctgggtttaaagactttaaaagaaacga

SEQ ID NO: 49117 - DNA, 983 bp, Arabidopsis thaliana
cacacaacttctgtagtattgacggtgcgtgtaagcatacaatgtgtcttggtaaccttcaaatcggcagttgaggaaaattgatcgatcggattggacacgtattgcgactgcttgatgtccctctggcccagccgtgttccggaaccccattgactgtgccatgaacccttctccctgtgcaactattaaggataccaaacatttaaaaaataatttagcttttattcacattgacgttatattcattcatttttaacaaaaaaaagtaaaaataaaatgatgttcattatagctttttagatttcaagatttataggagtttaacctataattctattggtctatattttcaacttttgtcaagacaaattttccaaaagaattaggggttttaccgaacgttgccgtgagaaaagtgcggattttctttgcatggcttttgttaccggtcacaattgtcttctgtgatccatctccgaccatagtgagattcgccttcttcttatcaacggtcacatattcgtcataaatgccttgtttgacgtagataatgtacctacaatttcaatacaacaaatttacttagtttttaaaccgaaacctaaacctaaacctaagatgacgtgattaccacgttcacgttataaaatgctttggtatacttaccttccctcatatttctcaggcattgctctcagcgcatcattaatggttgtgaaatccccactgccatctttggccacagttgcgtttggcttcaaagccttcacatcaacagcccttaacattcttctatcatcgttgcttacccaagacgggatgtcatcaagaagatgtcgttctacgaccttcattaccggagagagattctcggtaaatgttttgatcaacgcgagggaattgctggtcagaacttgagaagaattgacgctcgtcttcacttcagattttaagttcccttcttcaaacccgtcaaggca

SEQ ID NO: 49118 - DNA, 1621 bp, Arabidopsis thaliana
ttctattgtgaatgttcctgttttttgttccttttcattttgttttgcgttttcttgtcatgttcttctaagttggtttgttgtggtatttcacggttttggaaaaatattgataaatggggaatttaagtcgatcggctgaagttgaacaaatcatatattgcccataaaggttaatagattttgtatgttataaagagatcaaaattcaaatcttacatgtttttcgctattattgattaggaatatcattcattaattacgaaaagccttaaaacttgtttcgtgacaaaagatttgagtagaaatcaatctttagaacaaaaaatttaactttgcctcaactaagtttatgttctattatcttgtactccaaggtgcaatttgatctttacccacatcaattcaaaaaaaaaaaaaaaaacaaggcaccaccttacgtgtttattaagcatcgtaaaggccaagcttaaccggagaccctatcgcttggatccattccccttgtaagaatggccccaccgtaaatttcatcgcctcttccttgtttaaaaccctaaatccaggccatttaaccctagcagcggttctccgcttggaccatcattcttgtattccgcgtaagacaatgtatcgatagcaaaatccgtctcttgccatctcaaccaaccaacaggatcgatcacatcctcgatcgttgattccatcacgactgttcgagaatggggtttccatggccggccgagatagctcttgaactgggcctttacgggtttaagatcttcgtttggagcaactgtacagttgtggatcacaaagcctgtcgtctgaaacttatccactcgtccttgagccgtcaccgtgttcttctgccccggtaaaccttttctgataaagatgtcacagttctggaaaatcgcggccgcatcaccgaagatgaaatcaactgtcccgataatgacacaacttctgtaatattggcggtgagtgtatgcgtataacgtgtcttggtagccttcaaatcgacagttaaggaaaacagatcggtcggattggacacgtattgcgaccgcttggtgtccctctggcccagcagtgttccgaaaccccatggattgtgccatgaatccttctccttgtgccactataagtaaatcaagcacaaatatggttattgcacctcaaattcaagccctaattgtctcttttcgttcgttaacacctagcacaagcactcttaggaaaacaggatataccaaatgttgctgttaggaacgttcgaattttctttgcgtggcttttgtttcccgtcacgatcgtcttctgtgatccatcaccgaccattgtaacattaggtttcttcttatcaataatcacagattcatcataaattccatgtttgatatagatggtgtacctacaaaaacgaaattttactaagcaaagatttggtaatatactatgaaaccaaataattgaagtactgtggtcaaattttaagaccaccactaagctcactctctctttctttcgttactaaaaatttcacatgatggtttccgggcccaagatggataaagggtctcgaggcgggatctattgtttataaaatatgaagaac

SEQ ID NO: 49119 - DNA, 816 bp, Arabidopsis thaliana
gctccttcaagaaactctatcgctcgtccatacattcctttaccataagccttttgacctagttcaaacatcaattctgcagtttttctcctctctgcttgctcctgagctacctgctctcaccaatctctttcataagcacatcaaactcttataacctcaccaataacttacactttcgtagacaacctaagagtgttcaccaagctaagctaaagtaatctaagagtgttctttacacacaaatagagattgctaaggccaaaaaaaaaacctaactagagaaagagccctcaaaaactcaccttttggagttctctcttcactctcatcctcttcttctcctctgaatcgtctccttcttcatcaatcttatactgtaactcctctgctttcctctcaagctccttcgtatcatgaaattccttagctctcctcttcctctccttctccacatcgaaatattcctcctcctcctcctcgtgaccaccaccaccgcctccgtcactactttcttcgtcgctggatcccgcgtcgtcgaaatcgacggcgttacgtctggaattcgcttttccgcgagttaaaaaccggcgaacccgagcttcgccgtcagattcaagaggcttattggaagagagagcagcgtaatgagaaacgtgactgtgcgaatctctcttttgtaaattcaaaacgacgtcgaccaccgttaaacgaattctccgatcagttacaccgtacggtgagagttacgtcaagtaacaagccacgttccaataaccgcgcattagagagcacacaatccaaacagaggacaag

SEQ ID NO: 49120 - DNA, 555 bp, Arabidopsis thaliana columbia
cattccagctgagcttgagcttcgggcgagctgacccagctgatttccttacgatcctagcttagcccgcatgatttcccctttgtccgagcttatggccagctccttcccacttgtccgagactccaccttatttcctcggatcaagtcctagccaacgatcctattgaggattgcgggcgttacagacctccacctccaagatcttatggacatggaactttggtttctttacaaagtacggttaatcgaatctcctgttattatggacatggtatatagaatggatatggatcagtaaaaaggtttccgaatggatatattttaatgaatcgttattatggacaccaagaaattgtttgttgatttttctttcagtttgcaaatacctcgacctccaagactatatgaacatagaactttggtttctttacaaaaaaaaaaaaaaaaaaaaaaagctaataatgaaagatattttttataattttgatactaaatttgctatctccaaattataaatctaaccatacacaagtgtattgccaaagaaaaatg

SEQ ID NO: 49121 - DNA, 567 bp, Arabidopsis thaliana columbia
tgctaatgataacgatatatatataagaaagactaaaacaccgtagaggcaggttagacgcaactttcaaaatagtaataatagtcacgacgtttcaagtcacttattaatctagaagatacggtaatatatttttaataactcaattattaataacatggtaaatttgtcgattctcataaattaggaaaattataaaaatattttatcgttattcttaattggagttgttatataaataccaattgtcttaacactacaagaaaacaagcgattaacgacctacaagtcagtcatttcgtagtcgtaaataatgataatacgaccaatctgcgactaatgactgtagtcagtaatccatagtcgctaagtataggggtggttaattagtcgttggtcaacgacaataatacgacaatagcctaaacagtacaagttcgtcgttacgtagtcgtactaaatcggcgactacttgacgaccatcttacgattaatcatactgtacagagtgtgtcagaacatggagtcgtttagtagtcgttaataacgtatgacgactttacgact

SEQ ID NO: 49122 - DNA, 465 bp, Arabidopsis thaliana columbia
tgcaaagtagagctgaacattttagggagaagcatcaatttgatagaatacaaattatttggaagcctctttttcctacaacaacaacagattcatcactaaccaatataaatcatggtttcaagtttttttttttggctttgactaaaaatagtccaagaagaaaataaggtcaaaaacatgaaagatataattaaaatcaaacataaccaacataacaggttaaagtacatttgataatattggacactcatcaatgaactactatgatataatcgttggacatacagaagtggacattaatagtttgcagtctattatcccccggacatgatattgtggatactacctaatttgcagaaacaatttcttatatttccaccatccaatttcttgtttaatggggatcaagtcaaaccacggcatgaattctactacggttgaatcaatttatcatttttaatg

SEQ ID NO: 49123 - DNA, 593 bp, Arabidopsis thaliana
cccatcaatggttttatagctattgaccatgagctcattttctagggttatgaccatatccttagcgaaagtgatccacaatggtttggcttggatcacgccgtaccgcaaagaacctggttgaggattctgtgcattgtcgtaagggtttgtgacaacgtataaattacctttctttccgcccaaggtagatgaaccgaatccaaccacgcaatccgctaggtctttacgattggcagcccagtcagacttgagccgccaacaggagtccaccggattcatgatgttctgcggtttctcggggaggtagttggcaaccgtgggggtatacccgtaataaccattattttcggcatggaccaaggaatgacataagaatagtaccacgaggaggcacgaaacggtgaaaagagtcatggttgggtgggtttatggtttgacgtagggatcgatactaagaaaagagaaaagatgggcaagtacttaaggaagtgtttagatgagagattgtgtcggaaagattagaaggtgtggtaacacgatctttcctaatattggctaaagacaaagttgattggtgaactttggtgttg

SEQ ID NO: 49124 - DNA, 477 bp, Arabidopsis thaliana
tgcattgaacgaggaagcctcaattgatactagactagagtgctcagctaaacacctaaagtcaagcatgagggcatcaaatgattggttagaactcaaggagaggtctaaatggcacgacaaagctattataagagagctaacacacactgtgagagagctgaaagatcaaattaaggagctccatgggaaagtcaaccacgcactactcgacatctaggacatcccaaatgatgaagttattcctatggttagagaagaaggatgtgaattcacattagaacagtctagaaaagacgactatccagatgatgataaacgagcttaccctgaaagggccattgagtactcaattacaatcctgtcacgagagtatgctgaatttgatgttgtatctactcaggtaggagaagagacgtcaattcgtactcgatcaccctcattgagcctaatgagtgtgaggagtacgctagagac

SEQ ID NO: 49125 - DNA, 550 bp, Arabidopsis thaliana columbia
gtgtacgagaaattttcattatataggcaatttttgagtgactaaaacacgactaaatagtgtagtcgtttaaagtaggtacaacaacttacaaaacgaattacatgtttttttaatcgaaaattacgtctattttgcgactatatttaatgacacgccgctgtagtcatccaatagtcgctatttagacgactattacgagctgtcgtatattagtcggcaaattacgtctattttgcgactatatttaatgacacgccgcagttgtcatataatagtcgctatttaacgactattacaacgtgtcgtatattaatcgcaaaatagcgactaatttacgactacatttggcgactcattaagaagtgtcatatactagtcgccctttagcgactaccaaggcgtctcgcctctactcgtataattgtagccaaatagtcaccaaatatagcgattatgtatgtagttgccgggtgcagtgggtatttaactgtgttcttgtagtgagtctaatctaaatacatatatgacagtagccttcgatatgata

SEQ ID NO: 49126 - DNA, 492 bp, Arabidopsis thaliana columbia
tagaagtcaactttttgttgaggtataaaacggcaattttaagaattcacgattaatttagccactttttgaaagttcaggtattaaataatattttttccctatctaaatccctaacgactaaaaagacaatattctttgtaaatatcgatacatgatttgatttgagtaaaatgatgatcaatggaccacccaatgaatgtatatatacatttatatgatctataaaatatcgatttccattttatgtgatgtatggtatacatatacatgtatgatcacatgatgtatctattcttatttacatatctgttatatacaacaaagtcatgtacagcatcagaacattggttctcttaagatttaaggaccatccttcaagggcttaaaggcagccaaaataacggctactttgcatacaagaaaccccaaagtccccaccactatctcttttggtgtgactgcaaatgcagtcatctctcctccaatgtg

SEQ ID NO: 49127 - DNA, 565 bp, Arabidopsis thaliana
taactaattcaccttcgcatcttgtctcctctgcacagactctaatgtacgtacattggtacaaaccatgttgacacgtcggggatggagcagagattggtgtactgtcaaccaaaacagcagtgggttctacatgatgtacatgtttacctgtcgacgtacacaatgccaatagacgagtgaattcccctggggttccacggtttgttgagtgtcattcacgacgtcctcctcaacatgaccaattccatagtcttccacaatcagatcaccctatttattgtaatcgtaatcttcgccactaccttcactaccgtcgattgtagggtcgagggtacttccatatattcgccaaacatttgatctgcatccacatcctcctcttcattatcctcatcctcatcaccttcatctcttccatcctcatatacatttatatcttcgtcaaacttatgagctgcatcaacatttgcaacctctgtctctgtaaagcttcccttgccgatagagtagaaagacacaaacaagttaatagaaggatcgcattacgaatcacataaatgta

SEQ ID NO: 49128 - DNA, 766 bp, Arabidopsis thaliana
gaagaagatacccaatccatatcaaaagctgcacatgtacattgctcaccattcccatcacagcagaagcaatcgttttcaagaatatcatctaaacctaattcctctaatatcggtggtggagcactgcaaaacaatagccattcctcaggtttagctgacagcaacccctatatatttagaagctttctttgacatagatcataagcttttttacctcaaactagcagcaatcttggcagtttcagacgttgagatctccggtgctgaatctgaaagacctttaacttcttcatctttttcagctaaaccatgtctacctactggtcccaatgcggctggactgctctcgctaatgatgctactttctgatagagatcgtttcatcgtcgatctaaaggcaataaaatggaatgtaagcatctctaatgaaacatagaatgtatcaaacttctctacaagtgtctcattaaacaggaaagaaaatataccttgaagtctctggtacagaattggcaagaaatcttgctgcgttgtaatgctgatcagaacccaattcccatagcgctggcttatctgattgtggctgaaagtatcccaagaacctgtagaaagatacaaatcaaagtcatataatttttcataccatagaaaaagaaaacagagaaaatttacccagcatacacgttaattgcatcttgcttttcggcatccatataggcgttactgtagtaacgttgtaaagtctgaagaattctgtgattga

SEQ ID NO: 49129 - DNA, 530 bp, Arabidopsis thaliana columbia
aattaataataacgaaatattgtttcaatcaacaacaaaaacaactagctagtcttgtccaaaaacgatggtatgtcgagcaacggcgattaaataagcaagtgtcattagctcaattggtaaagatcctagccggagcttagaagttgtcggttcgagtgacgcttgaaacgaaactaatattacatattgtggtttcgggcctgggggattacgggtttcggcctagaatctcctggtattcaaaaaaaaaggatctaataaagtgaaaactaacgattatacaatagataaaacgataacttatgagttattgtatgtggtatatatatatatatatatatgtctgtttctaaaatctatgagacttttaattctaaaagagataatagtttatttactgatatagccaatcaatatatctcttttttaagtattttgttttgttttgtttgttttcggtaattacttaaatctagaagataaaataatgagttttatgtacttcaagcaaaacttttggcaagtat

SEQ ID NO: 49130 - DNA, 653 bp, Arabidopsis thaliana
tttataaacggagtcatctttctcccagctctatcaccaagggcttttcaggtttggctttattccttttgaactagttttggagtttcaccagaattctgcgaggcttgactaaatcatatgttatgtttttcacagggaggacttggctcgtgtgtacactgcagaaatcgtctctgcagtttcccatctccatgagaaaggcataatgcatagagatcttaaacctgaaaacatactcatggacgtagatggccatgtgatgttaactgattttggtttagcaaaagaatttgaagaaaacacaagatcaaactccatgtgtgggactacggagtatatggcccctgagattgttcgtggaaaaggacatgataaggctgccgactggtggagtgtaggaatccttctgtatgagatgctcactggaaaggtaaaatgtcttcttctttttttggttccatagtagcctaatgtctaaggtgatcattgaaactgtgttgtgacaccatttgttttaccttctgcagccgccgtttctcgggagcaaaggaaagatacagcagaaaatcgttaaggacaagatcaagcttccacagtttctgtctaatgaagctcatgccttgctgaaaggggtaagtaaacaaacatga

SEQ ID NO: 49131 - DNA, 577 bp, Arabidopsis thaliana columbia
tatcccttccttaccccatcaaactataaaactttgatacgatttactctctataaatctgtctcgaaaacatatgcataagtcaaagactaaccgttataaacgtaatcccaccgttagataggtagccagtagtatcatgaataagtccacgaagtttcatcccgatcggacttcacataaatctcccacgttcttctaaatgtgctgcatcagaactgatatctaggtttctacaacttgagatgattttgggcaaactttcaaggtcaaatacggatggatcttaaatccgatggacaagctgtcagctactctgagttccttgaagcaagagctttgcatagacgtcttgattgtgatctaattatttctacttcatcgggaaaacgtgataacactgtattttactcattttaggcatgtatttatcatcatttaacttagtgatcactcattgtatcatatcattttgcatcacatttagctcattttgcatacttaggcaattaggatcatcttgcattcatattgaattttttggtgtgtttttaggtgtagaaggagcttacaagga

SEQ ID NO: 49132 - DNA, 470 bp, Arabidopsis thaliana
tagaaccaattaagctttacaaaattctagcgaaacttcaaaaatggttcgcaaaaaggaattaaacaaacctgaaaagcccttggtgatagagttggaagaaaagatgacctccgtttataaagtcgagcacaagatacagcctgtacttggtctgcaagggaatgtataacgctctaagttaagaaatagtaaagtaaaataaataggatgctaacagagagaagtgttatatatacctgaaaagagtatttaagttgaacaatgaatgggtgatcaattttagtaagaatatcgcgctcagctttcatgtattcagcatggttcttctccataatgtgatctttcctcatgactttcatagcgtatatctcagaggtctcctttttcctcacctggtagactttcccaaacgcacctttcccaacaaccttcataacctcaaaatcatctatgcctactacacctga

SEQ ID NO: 49133 - DNA, 580 bp, Arabidopsis thaliana
ctgcagccaccgtttctcgggagcaaaggaaagatacagcagaaaattgtgaaggacaagatcaagcttccgcagtttctgtctaatgaagctcatgcaatactgaaaggggtaagtaaatgttggtgcagtttgattacagaatcaacagtaaacatgaaaatctttgtgcagttaagaactatgaagcattgtatttagaacaattctgactcttgactttgtaatgaatgtatagctgctgcaaaaagagccagaaaggcgacttggaagtggactgagcggacgagaggagataaaacagcacaaatggttcaagggaataaactggaagaagctggaggctagagaagtgatgccaagtttcaagccggaagtatcgggaaggcaatgcatagcaaattttgacaagtgttggactgacatgtctgttttggattctccggcgagcagtcccagttcggatcctaaggccaacccttttaccaatttcacttacgtcaggcctcctccttcattccttcaccagtccacaactactttgtagatttactatatttttatgtagttcctacttctt

SEQ ID NO: 49134 - DNA, 875 bp, Arabidopsis thaliana columbia
taaatttcattagaaatgagttgttcccgaatagtccactactacaaatagttaataactgaagagagaaaactaagatggtatcaaatagcacttttctttcacttgaaggatcttttgacatgcgtgcatctcatttctcataggaatcaagttcagcaacttgcctaaaatcatcataaagctattatatttcttggtccatgctgcaaccttaatggttgtaagtaaaatcaacataataagctattatatttcacatggacctgtcctcttcatctttctctttgtccttcgcaatgggtacatcagatgtgggttgtactggttgttaccttaaaatattcgcgctcatggttcccgaggcatcgctgcctgcctgtgcaggagctcaatgccgcgattccatggtttgagccaatggaaacaaacatttatccctagaatcattaagtacatagatgtcagatataacattgttaaggttaatattagtacatagcaaaacattgcgtgttactacattggtatactaatagtttaaaatgtactatgggatgttacttactatcttggtatagttattgataaataaagatcttgatgtttgtgatttcagcttttgtctctttgaactaatctcttatatatgttacttgttcaatcttagttgattagagcaagaacataagatagttgagaagtggtccaagaaagctctacataaactataggctgcatctttctttcatgaattgtttctactttcttatttatttgatgatataaaactacccatttgcagataccataaagcgagcatgtcataagatatacaaatcttgaaacattcatataacattttaggtttagtg

SEQ ID NO: 49135 - DNA, 718 bp, Arabidopsis thaliana columbia
tccaaaggaagataacattactgtttcaagatacagaccataagctaatcttgtgtcttcacataaccaagagagacctgtttcaatagaagctcaatgaatcagaatgctaacatttgtgttttgagtaagagagaattaatgagtccgtacttacagataatgacgagagatctaatgagcgagacgagtggtacatcaatgagagaggtcttgaaactatactgacgaaaatgttgtgcaggggagtgacacgtgaggcacgtgatgctagagacgataagacaaggaactaccacatcagccaccgtgatcagaaccggtaatgaagaagctaacagagacgccgtcattgctgccacaaagaacatcgtccttaaacatcttcgtgctttctccgccacaatccatgacttccacgccgccatctataaatccggtggtggctaaaacaacttcaccatttttttcgaattcagacaaaacgttatagctttatgtaattaaaactttgtaacggttgatatattatagaaaacaatgcaattttcaaatattattggtacacagaataaagtaatgagttgtataagataaagtaaataaatgagtgggaaatattaaatgattaatgaaccaaaagacagccggcgacgagaaagagtaagggctttgaagagtttcggatattgatgaccatcgtgtaatcaaatatgat

SEQ ID NO: 49136 - DNA, 1147 bp, Arabidopsis thaliana
gatgagaaaagagagcactacttcgacaaatgaaaatggaaaatgtctttgtttaattcacatcataagaactgaatcttgtggtaaaccatcagcacatgattactacccagatgttgggacccaaatacgatgaatattgtgttgaattactatggtggcactctgttcttagattttcatttttacatttgtagcaagaatggtacacaaccaattgaactctgaaatgcatgtgcagatgatggtttttattttgattatacctcgtagttaagaggagtgtgttacaaaataagatcaaatcatcttggtttttatactctgaaatgtagtaaactatctttgattaacaccccttccctctgcagcgtcttaatcatatcttcagcttgtagttaccaggattgtggtctcttgctcttgatactctcagctatgcctatgtgttgcacgcgaagatgtatatatatgccaaccggctggtccaatttgaattttcttcattcttctgaatatggaatcacttgtatgtttcatgaaatgcagcccacaaagccatcgcagcatctaaagattagacattcatctcctaaatctgaattatcatgtatcatataatagaaaataaatgcccctccccttaaaccttgttgctgtttttggttgctaaatttgtacatatgaagaagatgaagattcagataaacactttgggtaccaaactgtggtggaaagtgtgatatactctacaagatacatgatttattttcgtctctgaacaaccaagtttctcaccgacctgtgagcttgaccatccatgcaccacccaagtagagccccagaagcggtgttgctaggagcatttgagtgacagggtctgtcgagggtgtgacaacagctgctgcaaccaccgcacctaccaccacatatctccaaattgatagcatttgatctcccgacacaacccctacttgtcccaggagtaactgaatgactggaacctgtaaaccaacaagaagcagccaaaattccaggtgaagatggctaaagcaacgtttaggaacatgtataatatcatattgccacatacctggaaagaaaggcctgtgctgaacataagcactagtacgaactcaaagtactg

SEQ ID NO: 49137 - DNA, 830 bp, Arabidopsis thaliana columbia
tgcttcagaacgagatcggcgtggacgttagagtatctgacccagttgctggatctgatgaacagataatcaccatttcttcggaagaggtactctaaataccctcagatcttcttcaatattatctgttacatttacaattgtgaacttgaagttttgtattcttactttgcttaggcacctgatgatccatttttccctgctcaagaagccttgttgcacattcaaactcagatcatagatcttattccggataaagataatttaataacaacaagattacttgtcccatctagagactctatatgtttggaagggaaagcaggatcagtatctgagatatcacgattaactggaacaagcgtacaaattctagctagggaagaaattccccgatgtgcttctatcaatgatgttgttatacaggtatgtttgtctatttttgaggagtcgagcattttctaaacaacttctggtctcaaaagagaattcttatgtgaatgtcgatgtagattactggcgagatcagagctgctcgggaagcacttgttgaattaacattactattgaggagtcatatgttcaaggagctctctcaaaaggagacaccaccagcttccacatccacaactggccctctcgaaggtgttgcaggagtaatggaggtagcttcatcaaataacacaattcaatctcgtgaaggtcctactagttcgaatctgaacttgcagcaagttagcacaatcttgccacagtttaaggtttttgttctcgtcaacaatcgtttcaatataaatgcatctgtaatcagttagggtcagacttatttt

SEQ ID NO: 49138 - DNA, 573 bp, Arabidopsis thaliana columbia
atatcagccctagccgccggaaatagcgctagaaagatagccgtggcttgcgccggagcagcaaacgccgacatactcgttgcactaatcgcagcggctaaccaaacgcgtggtcaagttgtatgcgttttacgtggtatcgaagaactaatcatatcccaaaaaatgttggaaccatcagagattcatcagatacaattcgtagtcggagaatctaacgacgacactctaatcaataatcatttcggagaagcagatttcgtcctcgtggattgtaacctcgaaaaccaccaagagatcgttggaaaaatccttaatcatcacgaagaaaacgcaagaaccgggggtggaagcggtgtggcggttgtggtgggttataacgcgttttcgagagggtcatggaggtttagcgatggaaggaaaacgcagtttttacctataggagaagggttacttgtgacgagggtcaatgataatcagaagatgatgatgaaaaatcaccatcgtgaccaagtgatgaggaagagtcgttgggtggtgaaggttgataagtgcactggagaggaacatgtg

SEQ ID NO: 49139 - DNA, 513 bp, Arabidopsis thaliana
ctctttttaaatgcaaaggtgctgtcatcaaatcgttgtagattcattactgctcctgagcggtttacaggagtaagtgtagacgttgagaaatgatatttgtgaagttaatcctgttgtagcaggacaaatttacgaaagcctgctccccgcaaggactgacgtcaggtagtttctaaccatagctgccctttctattcaaacgtgaaatcaataagctcatcagggacatcgcaaacaatatgaagacgggtttcttctctgccgtgactcttttcactaattgcgtaactgtcatgcttgggattatttaattctttcagcggaaatttttcctcgaaggctttatttagccgcccctggtttccttttacagcgaataaataatcacctcccatgtttttgtatcttctctgcaatatctttctggcaacccatcgcatcggttttgatgatttttcctttaatatccagcatgttaagaagttcagggatagctgtgatctcattgga

SEQ ID NO: 49140 - DNA, 658 bp, Arabidopsis thaliana columbia
tccaagagattaattgtctgcatagttttacttataataaaatgctaactatattacaataactatataaaatcatactaatttaataaaaccaaaacaccaatacaaaactagttcttctaaagactgtaaataaattggaaattgcaataggtatgctcagaaaaatccatatgtagatccccatattttcaactgtttcggtgttactgttgtccaaaataagacgcatgtatccctatgtgcagtagtaaacttaatgtagctcctatatcactatgtgtcagacaaaaagaaaaaaaatttgtgttggatattttgtgttgtttccttcgcctatttcatattttccaaaaaactttcttcacctctttctctcttctttgccgactgcgagaagaatctggcggcgagcgggtcaatgtatatcagaagatgaaaacgttgtgtggtaacctcaacgcacttggtgataatgaaaatgatgaaccaccgcagtcttctctcgatgggcttttggatttttccaacaaatcgacttcttcacgattccagaactcagtgaagaagctgaaagcattaagcattacagttctttctgcgctattaaataaatggcaacaataaacctttacttacccgttaaataattacttac

SEQ ID NO: 49141 - DNA, 848 bp, Arabidopsis thaliana columbia
tcgccgccatgagttcctcgatccagatcgttgttgaggagaagcaagtggatgttttgcctcttcaagatcaggttttgtttttgtattgtcccttatgaatcattgaaattaatctgcgatatctaaaatggaagatgaagtttctgttttgatttgtggttgattccctccatctttagctcttgaattctgaattgatctatgaaatgttctgagaaattagggaatttgtgaatgttgcttctgatatctcgttgtgtgtgtaatgttgtacttgggatggcttcaattcgggatctttgcttggatttacgtcttttgtagtttggttgttacctgtggagtgtctgatgttgaaactctgtcttatgtacacgaatttgtttctgtctttaggatgaaaagaagactccacaagtgttcaatgagctgagtttcgggaaccatgggggctgttgtgcaatttgcttggatactatacctcttcaagaaacagctatggttaaaggctgtgagcatgcttactggtacgtgtggtcgatttttgtttttttcagagtattttgttttgttgctagtggagtgtatatccttttttatatgaggaatgatactggtttggttataagtgatctgtttatcaatatttagtctgatactgtggaagttaccatttgtggtttaaggcatttgttttgttagatcagttttagctctcatctcaggtttctgaacgatcgactttggccttgctttaaacctgttataacgtttttctgtttctttcgtttgaacagaataagtatgtttgattagaaatgaaataggatatatactgacttttg

SEQ ID NO: 49142 - DNA, 576 bp, Arabidopsis thaliana
gagtgctgagcccggagacttgcagcctaagaacctccctgaaccttgctctgtcacacaacagctggctaaggtcaaacagagcattttagacactgtagccagtgtaagacagtttcgctgtgagctggaaagaaaggaacagagcattgcagacactttaagcattgtacgacagttccgatctgagatcgaggaaaaggaagatatgctagaagcttcactcctggaaatcgatgtgttaggtatgtgatatgaatgctgatgaacacttaagagtctatttttctttttggttataggtctctctgataatgtgatgtttggaacaaacaggggagaagatatcgggaatcaacaaaatcctcaactgaagatcatcaagtggattgcaaactcaactggtatcctgaaactagttggacgattgagtaacgtagttgacaaccagagagaagtcatttttttgtatagcgttatcactcgctcaagtctaaagacagttgattttcttaatgtcaagtcaaaaaccaatagtggttcttataggcaccacttttttgatgatttacaaag

SEQ ID NO: 49143 - DNA, 556 bp, Arabidopsis thaliana columbia
acttattggcctttttgttttggttgcattgattatggaatctaaacattttattgtaaaatttgtagtttctttggaacattttgtgttcttgaggtgtcaaaggatggaggagatacagtctcaatcggatttataccgttcgtcttcgtcttctgcaagtagtcctactagtagagttccatctagtcactttttctatgtaagaaaacctggttctcttcgacaacctatatcttttgaagactctcctgaatgggaagacacacctgatgttgatttaagaatggaagatgaagctggtggtggtgattctattaatgacgctacaacaacgcctgtttctccttcgttgtcgaagatgaatagcggatcaatggcttctcctcctgttcctgaaggaggagctgggactggtgttgttagaaagattgctggtgcttctattgcttggaaagatttgactgttactatgaagggaaagagaaaatattctgataaggttgtaaagagttcgaatggttatgcgtttccgggactatgactgtaattatgg

SEQ ID NO: 49144 - DNA, 1026 bp, Arabidopsis thaliana
  unsure (1)..(1026): unsure at all n locations
atgatcgaacaagacaacccaataaaagtctcgataattctctcgatcgcgaactcgcttggtggcccgaaattctttcttccgagaatcaaaacggcccctatggccgctgatatccctccggcttgcccgtacatcttgctcctgcttaagaagctagagcagagaaaccatggaagcaaagaaagaaaccgatccgtcaaaaacttctgaaacacaaaacagcccatcactccatacactgtccctatcactgtcccttgtgccttcacattcgtcactttaaacgtcgcctctctggccgctgcgaagtcgactgctacgggtaaaccagcccaataaccgtttggcttactaaacatcgaacctagcaaaatcgctaagcctaatgagagtgatagctttagcgccggcataattgtcttgctgtcgcaatcacttatccaagacctcgtcttgaatttgttttctaagaccttgactttgttctcctccggtttagctattatgatggtttcaaggagcctgatgcagaacaagaagaagtaaaagggcaaatcttgaggcgttcccgggatttcctgaagtgtttggaggcactcatcggggtttttcggatcagattctggtgttactgacggttgcgaactattattcactcttttaattgagagaatcacacgttcttgtatattcttgagatcttcttttacttcacccgcaagtaagctcgaaggaataggagatttgcttgctactaccatttccattcctctaagagcaatttccatgctttgtagtttctctcctttgttatcattcacgttttgccacctccatatcttaaatggaagcctctcccatgtcatgcttggctatatacacataaacatttcactattagaaatatgtattgtacatacatttatattcttttcttgtaaacagatattgtatttaataatgagaatcaagtatattacttggtaacgtttgagtgtntgataaagcttggaggaagacgag

SEQ ID NO: 49145 - DNA, 1603 bp, Arabidopsis thaliana
tagaacaaagatttccacgacaaaaaaaaacttaatattaattatataaaaaaagcttgacctaaaacaaagttatttgagtttgattatttaggattgttaaggaatggattttcatcgtggaatttagtgattgtctttcagtacactaagtgagctttttttatttatattttttaagaaagattactataatgatatgttttttttacatatgatgtgaagaaatattataatttttttataatataagctatcagtatagattatttaaatgagtactctcatacggatttcaaacgttaaaaaaaaaagttgggtttgaaacttttgaatgtcttttttgttttgaaaataatatataataaaatttgaaagaaaaaaactcgtacggagtacgaaagaataaaataataaatgtctttgacatccaattataccactgaaattttttttcatttttgaatggcagttccaaaaaaacgtacttctatctcgaaaaagcgtattcgtaaaaaaatttggaaaaggaagggatattggacatcgttgaaagctttttcattagggaaatcactttctacaggtaattcaaaaagtttttttgtacagcaaaataaataaaaaacactataataattagaattagcctaacttaaaaaccaatttgtttaaatacatctaaaaaaaataggaagcaaaagaagaaaaaaagacaatatatagataaaatatataaaaaataaaggttcgcatttttttagttccaaaaaggggattcgtattgttcccatcactaccttgagacaataataaaaaaagatcttttatttcctcttaatgaggaaataaaagatcttgaaattaattactttaagtgagcaaaaaatcttatgtttgtacaatataaaaagatacatcaaaaaaaatattttgataatttttttgatttctcttgagcaattaggaaaatctaattttatttaaaattgctaaggattttgaagaagtttttatttttcgaaaaagcatttttttatcaattttttttcatataaatgaaaaaaaatgataaagagcatttagagttttgtctttgggttgaagttccaactactttaatttagttacatttttcattgtattctcgaaaaaaatataaaggacaaaaagtcaattgaaataattttaaaaatcaattggaaattttaataaattggcttctttatttaaattttaatctcgacgattgaatcaaaacttgttaatattgttttgaacaagttgccgctatggtgaaattggtagacacgctgctcttaggaagcagtgctagagcatctcggttcgagtccgagtagcggcataagatcttctaaaagagatattataagttttataatcaaaataatacccgacttttttctaaaatcgggtaaaacctagtattaatttattaatttttaacaaattttttatgattttttcaattttagagcatatattaactcatatatctttttcggtcgtttcaattgtgctgacaatttattttttaactttattagttaatttagatgaaatcataggattttttgattca

SEQ ID NO: 49146 - DNA, 547 bp, Arabidopsis thaliana columbia
cctgagtatagtttgaatattctagtttggtttggttacaactatttttcatctaagtgatcactgttcaatgaccatttcaaagcttttttctcaattatagtcctcaatgaagtccaattatgattgcaaaaaagattaaaaaatcgaacgaaaacaaaagaatgttataatagtttgaaaaagaaaagaaagaaaaataaagaaatggtgagtttggttttttgttccctctcgttcgaacatcaagacacactcttcccgtaaaagtctctctctctatcgcagataggtgctttgtctccttcttcgattactccgatcacctaaaaatctttccttttcttcaaagcatttctctttgattcaaagacaacacacatagcttagttcctacattaatttctcgcaataaaaaaagttcagatttcgaggtattcttgcaatctcgatcgagtttcagatctggggattcaataattagggcttttgattctgcattgtcaatgacgaattcgggtttcaatgtaaagatctgaggaaaaag

SEQ ID NO: 49147 - DNA, 628 bp, Arabidopsis thaliana columbia
ctccaggtggctcaaagctaaagaaaatgtgaatgagaaatgatttcaacgaaaataagatttacataatagccaatgacatatatgcacttgtcaagttggagttaaacaataaccacacaccgaattgaggagcccattggaaaaaacagaagcaaatatatttttatgtaaaaatagaaacggaataatatagtaacaaaaagatactctcttcaaccttatccattcttcgccacttctcccactaatccgctaaatcattcttcttcatctctctctcattcacaattcccgaaattctctcaaatcacagatccttttagggtttttccactgtttctaggttttttttattgctcaaatctgatcaatggatagttgtctctctaatcaaacggcgcttcagtttctcccgtcgcgttccaggagacagagcggcgatggaggcggtggttttgttattccggcgaagaggaagatccagtatagttcgatggttgtggttgcggcggcgggacagagtcggtgtgagcctggaagcagtctaaacgcgccgcttgagccacgatcggcgcaggggaggtttctgagaagcgtgttgctaaacaaacggcagctatttcat

SEQ ID NO: 49148 - DNA, 1176 bp, Arabidopsis thaliana
gagcacaagactttagttcttctatcgttttaggtttagatcaataaatacatctacacgtgacataaataattcaacagaggactggaacacgtacagagcccgatgatagcaacttgcaacaatctgccaaaatctatttaaattcgcctatcaataaaaatataaatatgtataacacatatattacttgagtacgtagcaaatgaaaccaaaacattagcatacaccgaaccaaacccgagccaacagttttcacttagaacgagccatcgtcgtcgtctagagaacccgatggacttagccgtgagttgttattgataaccaccggaaacagaggcgtggcggtctggttcgatggcgaatgtagtggcatggatccatacaccgttctctcgtttacgcgtccaacttctttacacacttgatcaagaatcgtcagaaagtctctgaccacagcgaaaatgcgaaaaggatgagtttccgagttcccgtggaaatactctgttacttctttaaccatcttcatgacattgtctccatgagattgtaactctgtgatctctttctcagctttgttcaagaacgagttcattgactccaagaatctctctagacctgtttcttgctgtagctccgtgagtacttcctctgacttcgctattcctctggcgatttccgctgtttcgttgatgagggaatttgaatccattgccgctgctttcttgacgttaatcagctgagagctgagacctgaaacgacttgcaacccgagtttcttgagctctaggtcatcttggaatgcggattgctcggccatgttatcgcctatatggctttgactcggagtaaaaggaacccgagctccttcaaattttatgatctcttgaaccacaaaatgcaataaggtggttttcccatccgcgcctttgatatctaccagttttaagagcgtgtcgagcttgaaagcatgtgcgtcccctctattggttcctatattcatccggttcccagtcttgagcacggcttctaaaagcttcaagaacatccgcgtgttctttaactcaccagtagcagcctgagagtttgatcaaatgcatatgaatgatctgtttgatcagcagacatacacttatgaggtggacaagtagagttttacctcgagagtgtcgaagg

SEQ ID NO: 49149 - DNA, 605 bp, Arabidopsis thaliana columbia
cccatctctagtgtacgtttcatgtcacttgataaataaaatattttaggaagaaagtgcgagaaactcgggagttatacaaaaaaataacatttttgtagaaaaaaagctctcgtcttttcagttacttttctcttttgtcacactttcatatttttttctctaatcatggaggcaacagaattgcattagcttcattttctctcatacttccacaacctgtaactttctgatcttccaggttagttcacacaattttgcatgattgagttacaaagttatgatttttatgtgttattgagttacatgttatgatctttttgtgtaattgttataaagttttgattgttataaagttttgatcttttttgtgtgtgtgtgtgattgagcagtgaattatgctaaagaagagatcaagaagcaagcaagctttaatggcggaaacaaaccagagtcagaatcagaaacagagtaaaacgacgccgtttccgaggctcttcacagcttttagtagctttaaaagcttcactgaaaacgacgccgtcgcgagtccaacttcaattctcgacaccaaacctttctctgttttgaaaacccatttggat

SEQ ID NO: 49150 - DNA, 844 bp, Arabidopsis thaliana columbia
taatttaagacagtgactctgggaaatgtgacagaatgttactagttggtaattactcctaatttattcaaacatttagaggcaactagtcgtttaaattattttaaatcaactgcattcaaatatgaatgcaaaaacctaaaaaggaatatttacgagtctatataatgtcagatttggtcacaggagcgccgtgaagcaacgggcgagaattaactacactctgtggagtttcttaccatacactattttacaattcgtagttaatgtttttagttttatatttggcttgctttctctatttttttcactaatacagctgaaacatttttttaaattaggacaaaagaaaacagtttttatagcaatgaatgatcagatccgatactgcaaaatataaattaatttaatttttaccataccacgtgaatgatctgtgttttcttgtttgatattgttctttctctttccattttaatgttagctcgtatcttatagctataactatgacctatccgttacaaataatactttatgatgatctctctttcaccccatgttaaattgaacataatactcgtatagtcttaagatttctgtcttatctttttcaagtgtatgttccaaccaggtatcgtggtctggtggtaaaggaacctcgactgagacgtccgacacccggattcgatttctggtcaccagaaaattaacatgcggatttgctctagcgcctcagaccaccagttccagggagccattaagtagatgtttaaaaattcctggtcgcgggcttaaacccagtggactagtcagatcactgtgtggtctggacactaagttgtca

SEQ ID NO: 49151 - DNA, 520 bp, Arabidopsis thaliana
cccaaattcatactctccaggtcacggacagagacatccactacagtactctcctccaattcatggacaacaacagttaccatatggtttacaaagggtttacagacattcaccatctgaagaaagatatttgggtttatccaatcaaaggtctcctcgcagtaactcatcattagaccccaaacaggaggaatgtaaatttttttttttgataactcagtgtccagaccacacagtgatctgactagtccactgggccgaagcccgcgaccagggatttttgagcctccacttaagggccccctggaactggtggtctgaggcggcagacaaatccgcatgttaattccctggtggccaggaatcaatttgtaaatttgtaacaaagctttttgtttttgtttaagttagtgatttttttaatgttttggggcttaagaatgcaaaaaaatttgctctgtgtaattaacatttaagatgctaatgttattgcttcacaagttttagtcacctcagatac

SEQ ID NO: 49152 - DNA, 912 bp, Arabidopsis thaliana
taatttatttctgatgtctagacttacgtacgtacatgtttaagaataatttggtttcagaccgggaatgttttattctcataattatcaaagctttttattatactagtagtatctaaatttctaagcaaaactactagaactttattatagtaaagcagaagttagaagaaaaaacataagactggaatatttctcattattctttattttcccgttttccttgatcatcttggaattgactcgtagcttaactaagcatttatacctgcacaacccaaaaacaaaacaaacaaaaaaacaaaaaaacctcagaaacagatatgaaatagaggtctatatatcattaaataaacacattactacattagccgagttagctagagctgatatatgaggttttatcctacttaatctacttggaatcttaggccaagtctttttggtttggccatatattaggccaagtctaaaatgttggtaactaaaactaaatatatattgagatttgttttattcatcctcatcttgggataacgagccaaatatcaaacttcttggttaaaagtaaataaatccgtaccacaatccacaggaggaaggttacaaagcgaaggaagagaggtggctgcacggagagcgttgcatagacaatctctattagtagattgaagtgcggcgcaacactctgaatttggtctgcctgaaccgggcagcaccatggcggcgcatacctgcacatttgctagatcgttgccacattcttgggcttgaactaccgtttctatagcagtcatggcaagaaaaaggacactgagaacggctgcgaaagacttgaacgatgccattattgcgatggataagtttgtttctatagatatctgatgtagtctatgtatatgatacatatgg

SEQ ID NO: 49153 - DNA, 680 bp, Arabidopsis thaliana
agaatctaactacacaatcttcagtgtaattaagaaactcaagatgtaaatctactgctgtaaattatacataatgctaattcaaggcacttacgtctcaaatcacaccaacgaattaacagctaaagaatcaaaatttaagaattgggagattaatcattgaccttaaagttggaaactttagatatcaaattgaccaacgataagattcaaaagaagaaaagattaaacccaccgacagaaccaagctgagatttcttggatgacccggaattagtcgataccgtaccaccggtaacagcagcaagctctcgcctctgtttagcagacgaactactcgcagaagacgccaatttcttagccgctagggcttgttccggcgtcacatactttcttggtcgacccctcttcctctttaccggctccatcggcgccgtcacagccgaggacggaactgaatgagggtacaccgcgagagaagatgaccatcattaggctggtgctgtggctgaggctgcggagggaaaacccattgttggccgatggaacggcgtttccggtagaagcggtggttgctacggtggttggaaggtggtgatggtgctgtagatggtcgtggaagtaaggagaagtgagtcgttgctgctgctgctgttgctgttgctgttggtggaggtgat

SEQ ID NO: 49154 - DNA, 1053 bp, Arabidopsis thaliana
ttagctcttcctcgatataccctttttcataggctgttttcttggctttcttcacacgattcgcgatgttagagattgatgattcttcgagttctctcacagttagctcgacgtagacgtctatgtaagcgttaccgtagtatcctttaggaagtggtgggtccaaaacatgtcggattccaacagccacgccgaggacagtgatcccgtcaggctttagttttagggctcgagatcttaatttccatatgtatgaactaagtacttcataagtagtgaaactctctttaaggtactcacattctttcatcatagagtctttaagcctttttatatccccagcacgaatgtttattgtctctgtgacctgttggataataaataaataaaaatcattaacctaattattacaaaaataaatatttgcaagatcttctaataagctaaatcatcacttaatatgatattaatagctgaatcattactttaattatatgatattaatttgatacggagagagtataaaataagcttgacaaaatgacatacgacatcagtagttggcaaatatgctgaggtggccaaaaaaccatcaatatggctaccgggcactttgcctggtttattgtcaatttttccgaccagccgctctctctgccacactgacttcaccgatggctcagtctttcctgcagccaactcggtcaaggcatggatgatctgagccacaccgtatccatcacacacagcgtgtgtcaatgcggtgccaatggtgaatcctccacaggcaaacttggtaacctacaaaagaaacaaagtgaacaatatattatcttgattatgtattgataatatattcaatgttataatattttggaaatctataactttcaatacatctagaaaatgaaaacatacctgcaaagctagagggtgataacaaacgttgctctcgtagtcgatttcgatttcaggtacaagccgcaaagcaacttggtcatcgaggttttcgatatagttcagagaggagacgtctagagttgatgtagcgac

SEQ ID NO: 49155 - DNA, 775 bp, Arabidopsis thaliana
ttctcgttaaaagggtttgttataaaacccttgattttacttgttttagagaggttcttggtttaaatcttcttgtggtttaagtctttgtggtttctctaatattttcttcccaagatttggatttgctctgttttgtttgtttgtttcagttttaataatggatgatcagagtaatcgtggtaatgataatcataataatgatcatcatcatcatcatcttggtgtgaataagatgggaaaaaacattcgtaaagatccaccaaaccaacaaaatcaacaacaaaaccctcaagctttggtttacaacatcaacaaaaccgatttcagatccattgttcagcagctaaccggactcggttcaacttcttccgtcaatcctccgcaaacaaaccatccaaaacctccaaattcacggttggttaaagttagaccggctcctttgacccaactcaaccatcctccacctccacctccacctccaccgacggttcaataagttccaattgcatctgaaccggttcagcctgttaaccaattttcgagtaacccggctgaatctcccatctcggcctatatgcgttacctaatcgaatcaagccctgtcggaaaccgagtgcagccacaaaaccaaaacccaggttcaaccatcaacaggtttatttcagtcacatcaaacaggtcctaatccaatgtcgttccagtctccagcttcacagtttgctttgtcacagcagccaagatcaccatttcctttgttctcacgcaattttgc

SEQ ID NO: 49156 - DNA, 659 bp, Arabidopsis thaliana
cgtctgttttgtgtatcccaaacaagcttcctttaacccaacaacttctttcaccaactcagccaattctttgatcgtcacttcaacaccacttcctacattcacatgctcaaatccgctgtactgatccatcaagaaaacacaagcatcagccaaatcatcgacatgtaaaaactccctcaacgggcttccacttccccaaaccacaacttcgtcagcattattggctttggcttcatgaaacctcctcatgagagcaggcagcacatgggaattctccgggtggaaattatcattctgaccatacagattcgtgggcataccggagatagcatcccactgatgctgaagccggtaagcttgacacatcttaatacccgcgatcttggcgatcgcataccattcgtttgtcggttcgagcggaccggtaagaagcgcagattcgggaatcggctgaggagcaaatttggggtaaatgcaagatgaaccaaggaagaggagtttcttcacaccgtgtgtataagcagagtggatcacattggtctggatttggagattgaccccaatgaaatcagctgggtatgtgttgttagcatgaatccaccgactttagcagcagctaggatgacataaactggtttctctgtagcaaagaaaga

SEQ ID NO: 49157 - DNA, 743 bp, Arabidopsis thaliana columbia
gatcttttaaaaagaagaaagagaactgtttagtagagaaaccaagaaatcgtaactcttctctatcactaatatcatgatatatttggggataataagttaatcatataatgacttgaaatggttcgtctcaaggtttctgattcagttcttgagactttgttttgtaactgtttccagtagaagaaactgatttttggtttactgccttatttcagaccagggtcgtttgaccacagaggagacatacatgaaccattcgattcaagcgggtcatacccgaagaagtcccaagatgctgcagttggtgcccttgtgagaatgctgaagaaagcgccacctctcagacaagatgtctctgaatcttccagacctgaaatttgctcgaacaacaacaaacccgcaggggctcatgagatagcagtagcgtctatcacagcctcggggattgctctggcctcaaagacaacagctgatgctttggaagagttgaggtcttacaaagaaatgaagaatcatttgttgcttggtcaatccacatcaaacccttcctcggttactattacttcaccctttgatgtttgatgtttcagaatcttgacccattttgggtttcggtttgtttttttttttttttttttttcatataatgtgtgcctatgtaaataatattaagctctctactctttggatgatattggtccatgtaaataaacttatacccaggaaaaaaagaaaaaaaa

SEQ ID NO: 49158 - DNA, 1592 bp, Arabidopsis thaliana
cacaaccgtctcctgcaccggaggagaaggcataatcgccggcgattgcttttgccccttttgtgattaaggttttattaaattaatttgaaatgagtttcgtgtcagagcttgagcggggccgtgaagtcaagtgactgagccaacgaagacgaagaagaaggtaagcgaaagagagacaggttagggctagtgagccgcgttttgttcacgctatctttaacaaggcttgtgtaacgccattgggccgagaattcattatttgtcattttagcgttgcaacttgcaaggatagccaaattagtgagatatcaaatgtttttcttgaaacttcttacaactgttttgataatttgtatagaagagagctaataatagaccatactcggagatccaaaattaaaattcctcagacaatgttgtataaagaagcaagtcttatctctaaatgaatcaattttgataaaaaaaaaagcaattctcgaatctcaaagaaaggtttaaatcacaatgtggtgataagctgatttacctgagactcaatagttgtgtatatatgagaagagaaaccattaacttatcggttgcaaacattcttcaaataccaatcataagtttggctcagaccatctctaagagaaaccttaggtgtccaacccaaagacgcgagctttgagctgtccataagtttcctcggtgtgccatctggcttagtgcaatcccatccaagcttcccttcaaaaccaacaacctctttcaccaactcagccaactctctaatagtcacttcttgaccacttccaatgttaacatgctccaacccgctgtatcgatccagcaagaaaacacaagcatcagccaaatcatcaacatgcaagaactccctcaacggactacctgtaccccacaccacaacttcctccgctccattcactttcgcctcgtggaacctcctcataagagcaggaagcacatgagaattctccgggtggaaattgtcattaggaccatagagattagtaggcatgccagagattgcatcccatccgtgctgaatcctataagcctgacaagtcttaatcccagcgatcttagcaatagcataccactcattagttggttcaagcgatgctgttaacaaagcagactcaggaattggctgaggagcaaatttagggtaaatgcaggatgatccaaggaagagaagcttcttcacaccgtgctcatatgcagagtggatcacattggtctgaatctggagattgacaccaatgaaatcagcaggataggtgttgttagcgtgaataccaccaactttagctgctgctaggattacataaactggcttctcttgagaaaagaaggattcaacatcggcttgacgagtgagatcaagctcggcgtgtgttttaagaacgagattggtgaaaccttgttcctgaagcttgcggacaatggcagatccaaccaaaccacgatgacccgcgacgaagattttggcagatttgtcagacatggacgaaacctctgcacaattataaaaacgctgcgaaattaaagactaaaggttttgacgatatctaaaatcaatc

SEQ ID NO: 49159 - DNA, 808 bp, Arabidopsis thaliana columbia
ccccaaatgccctcacctcttgagagcgagtcaggacttgagaagcagatctacccccacctcttgatcctcgacctccgccttgggattgtcccgaggatcacctgtgcacagacacagaaacttccgggctagaagccatgagttccaccctcgcttctcctggaggagcgacctcctagtcaattatgaccaggtcagccgcatgcgcacctccagcaagattcgagctctctttggagaggacggtgcatcatcagctatggcaacctcagatggtccagagacctgagcgaccctttgattaccatctgcccgccctctgtttccaagagaatgacttccttggtttttactacaatcaaccaagagggaacgacgttattaacagtacaagcgcttcaaaaactagcaatctatgcttactagacagggaaattaaggcagcggatctccatctgacccaggttagtggaccaagtccttatcatcctcgtctggtcgaagtcaccaacagagtgatggtccaccaaaaagaagaagtacttggctcgccaattcaaatcccgacagaccttcaggccacctaagattagagatccgggatgagcgctgatatagtaggttccaaggtcactccgagcgttggtttttcatctgacaatattgcagcaattcgtgacaaccaaactctctgttcatttccccaggtcgggtgaacaacgctaatacgtggcgtacaaaatttgagcacatccgaggaaaagcgagtccgaggcagtaaaacatctcgaggatacacgctgga

SEQ ID NO: 49160 - DNA, 751 bp, Arabidopsis thaliana
tgctgaccaaaccactcataagctacctattaccgcaccagaacgccaccacgagcatgttatctgatgacaacaccccaaaatccatacatatccctttgttggaccaagactcgttcattgagccttcagggaaccacaatgtgcctcggcctgacagtatacgtggcttcttgacacggcccactcgaaccgtgcattactactggagacaatttgatgactccttcatgcgacccgtctttggaggtcgtggctttgtaccctttgttccaggttctccaactgagagaaaccctcctgatcttagtaaggcttgagggtaacgtggaagaaaagctttgattttttttggtagaaaagggtgattcaaattatgcttttgtgtaaattatccatttgtaatattgtttgtgaggacagaaatctgtcctaacgttttgagagcagaaagcaaaacatggcaactttgaagtgtttgattgatgtatgtaattatattcatatttgttttgttgtaacacaaactacacatttgtttatgttttgaatttggtttttgcttcgaacttgaggatcggattggtacggtttggttcgatttcggacaaaaatattaataaagaattatttctttatgtcaaaacaaaaatttagtgaacctaatggctaatgatatcaaaatttggtaggtcttgaaacttataatctaactagattttacccgcggtatacgcggaacaagggtacg

SEQ ID NO: 49161 - DNA, 1761 bp, Arabidopsis thaliana
tcgctctttggctgttgcaagacaggtcttttcggttactatatatcgtgaagtttatgtgtccttgtttctttattgtgattcatatcgatttgaatggtgcaggaagttctcgagaagaagaaagatgctcctggtggcccatggcaacttgtaggtcttttacctctttttgatcctccgaggcatgacagtgccgagacaatcaggagggctttaaacctcggtgttaatgttaagatgataaccggtaagaatcataagttagtccttgtctctctgcacttcatattgcttgaaactagttttctcttctgactgaaaccaggggaccagcttgcaattgggaaagagaccggtcgaaggcttggaatgggtacgaacatgtatccttcttctgcgctgctcggacaagtcaaagattcttccttgggtgcacttcctgtggatgaactgatagagaaggctgatgggtttgcaggagtctttccaggtatatacactttaatagaaggctatattcttaaccatgcgtcctagtacttgtccagattcttattgatagattctctggtgcacggaaacagaacataagtatgagattgttcataggctgcaacaaaggaatcacatatgtggcatgactggagatggtgtgaatgatgccccggctctcaagaaggcggatattggtatagctgttgttgatgctactgatgctgcgagaggcgcttctgatatcgttctcacagaacccggattgagtgttatcattagtgctgtactcaccagtagagccatattccaaagaatgaaaaattacactgtgagttaaaacttattctcatgaaatttttcggtttattcgcagactcactaactccaatcttgactttgtccctctgtgtagatttatgcggtttcaatcacgatacgaattgtggtaagtgtacttagtaggtctcacgagatttcatttggtttaaatggttccaatccaatcctgatgtaaagttatcgtaacgtctgcagtttggcttcatgttcattgccctcatatggcagttcgatttttcgcctttcatggttctgatcatagcaatcttaaacgacggtaaggttaccttatagagtactaactgcatataatagtgagcagtcgataaaattaaccgaagcattgctacttataggaacaatcatgacaatatcaaaagacagaatgaagccatctccacagccagatagctggaaactcagagatatattctcgaccggcgtcgtgcttggaggttaccaggccttgatgacagtcgttttcttctgggtgatgaaagacagtgattttttctcggtatatactcttattctcaattgctgctctaggccacttcaaaaagctaaactcttttgggggttatgtagaactattttggtgtgagaccactgagccaacgtcctgaacaaatgatggctgctctgtatctacaagttagcatcataagccaggctctcatcttcgtcaccagatcccgtagctggtcctacgccgaatgccctggccttctcttacttggtgcatttgtcatagctcagctggtatgcacctactcctccttgaactctgttcaaaaagttcatgaaaacagaacaagaagttaatagcggtctatgcaatctcaggtggcgacatttatagcagtttatgcaaactggagttttgcccggatagaaggagccggttggggatgggctggagtg

SEQ ID NO: 49162 - DNA, 813 bp, Arabidopsis thaliana columbia
ctccacattcttcagttcttggagcacaaacctagaacttccaacgcccgtagaagacttgcttatcagtctcaaggcagaaccttttaacaacagtgaaccactcagaccactctcggtttctttattcttccgcgctctatcattgcttttaacgcttaaaccatcaacagatttcgctatctcactaccttctttggagctagattctgaattcacagaagcacatggttttttcttcacagccaaggcatctctctttgcagaaacagaactatccggtttggttatacctggactctgtctactcacactccccaatgacttccttgtcgaacttggtgtctcaactttgatcacaactgaaccttcaacactctttctccttgcaatcttccacggcttcacagcatcatcttgatcacatttcttcccatgtttacataaatcatgagtcgaacccacacgatgattcccacgataacgggactgaacctgcggtttacttatcgttccagtcgaatggcgtctcaaagtcccaccttgaggcttaggcacttcaataatctctggtataatctcttcttgatccttggctaccacagctataacatcttccacattttccacatcctttacacgtactgtttccaaagagccttcttcagacatcttcggagggtttgtatcggaagaattctcaatatctttgacctctgaagtattctcttcagccattgacaaaataaacctgtagaggaacagagtgcattacgaaaaagatctcgacgtttatgaacagagcatattaga

SEQ ID NO: 49163 - DNA, 611 bp, Arabidopsis thaliana columbia
  unsure (1)..(611): unsure at all n locations
tgaggcggggtgagatttaaaaggaagaattataaaacaaaacaagcacaaatggtccacaagcagaacctgtaatcggtgacagggagcagtggttgaacgtgagtggagaagatcacattctcgtcatcgtcaaccaggcaaaccgatgcgcactgatcaaatagtcccatcagcaccaccaccaaccatttcacagtcaagtgccatagccttgagacgtgaaccagcaagtgaactagaaggattcctttgggtagatgttccctgatatgaataaagcactaatcagatcatttaaggggaaaactgctgatatttcaataatcagaaagaatagactcgggaatattggaggcggcagagcatatatagtccacattatctaaataattcccaacaaaacttacaagaggacgaggtggggagaggtgacacttgtttttatgctcggcgagacaaaggcctcctcaaagatttgaagacagagagtacagcctcgtttagtgaaaatggctttgcagtttcctttggaaagatggtctggaactgaaatagttggaaagacggaatanacaaacatcacaaccacatattcatcgatgtgtggt

SEQ ID NO: 49164 - DNA, 596 bp, Arabidopsis thaliana
tgcttatgacactgtatggctgcttgcttacgccattgatgattttgagagcatcttacaggttgacagaatcggcttaaccgctaggataaagtttactagagacaggaaccttgtaaatccagcttttgatttgcttaatgtcattggcactggttacaggaccattggttactggtataataatttaggcttgtctgtgacgccgactgacgagctggagaacacatccttttcgggacagaagcttcatagtgttgtctggccatgacagaatttgaacaatggaaggcatttgaggagtggagttccaaatcgttccgaagaggttgtctcagtcaaaagcaacgggatgatctctggcttctgtgttgatgttttcattgctgctctcaacttattaccttatgcagtcccgtttgagcttttagcttttgggagtggtcatgacaatccaagcaactctgagctagtgcgcttgataaggactggggtgagtacataagcactcttttagacttgttttgatgatcctctgttagcatactcaataataagtaacctctttgttgacaaactctgtttgtaaatagtaa

SEQ ID NO: 49165 - DNA, 598 bp, Arabidopsis thaliana
cttgatgctctgaaagtctttgatggaggaaagatatttcttgagagcatcttacaggttgatagaattggcttaaccggtaggatgaagtttactagtgacagaaaccttgtaaatccagcatttgatgtgcttaatgtcattggcactggttacacgactattggttactggtttaatcattcaggcttgtctgtgatgccggctgacgagatggagaacacatctttttcgggacagaagcttcatagtgttgtctggccaggacattcaataaaaataccacgtggctgggtgttctcgaacaatggaaggcatttgaggattggagttccaaatcgttacaggttcgaagaggtagtctcagttaaaagcaatgggatgatcactggcttctgtgtggatgtcttcattgccgctattaacttattaccttacgcagtcccatttgagcttgtagcttttgggaatggtcatgacaacccaagtaactctgagcttgtgcgcttgataacgactggggtgagtacataagcactcttttagaacctgttctgttgatggctctgttggtgggtgtgtatttgacatattttgt

SEQ ID NO: 49166 - DNA, 558 bp, Arabidopsis thaliana
ttgtggctcaaaaatctttttcacaggtctatgatgcaggtgttggtgatatcaccatcataacagagagaaccaaaatggcagattttactcagccgtatgtggagtcagggctagtggtggtggctcctgttcggaagttgggctccagtgctatggcgttcttgaggccgttcacaccccagatgtggcttattgcagctgcgtctttcctcatagtcggtgctgtcatttggtgtcttgagcacaaacacaatgacgagtttcgaggccctcctcgtagacaagtgatcactactttctggtgaaaacataataagctccaactggatgaacgtaattccaaacactacaattttttctctgaaatatgtcgttgtttacttgtcttgcaggtttagcttttcaactcttttcttctctcatagtaagtgtactgcccacaccccctattctatcttaagttgttttccatttttaaattggtttccaattttctctgctgaatttatacaggagagactaccaccagcaacctaggaagaatagtgctgataa

SEQ ID NO: 49167 - DNA, 1117 bp, Arabidopsis thaliana
atgagcgtgaagtggctacgaggtatttcataaagcattttaattttgaaaatcaacttcactatccaaaaagttcctaaaatctagagaaactagttttttaagcgatttgtttttaagtttgttacaaaatccaaaaattaatttaaatatatattcacagccaaaaatgggctacgaggtctattgacccaatgggctttttaagacttaaaccaggttagaaaaaatgaaagaaaagtcgtaaatgcctcgtgtacaaaaaaaagtggttaaacaaaacaaaacaaacaaacaaagcgggctttgaaaactccgcctccgtttgttggctatttacactcactctgtctccgccggtagatttgtcagctgcgtcttcctcgttttctctctctctgtctgtgtctcttagaatgcaatcagctatggcgctttcgttctcccagacgtcgtttacaagaccaaaccacgtgctcggatcatctggttctgttttctctacgcccagaagtctccggttctgcggactccggcgggaagcgtttggtttctcaacgtcgaatcagttggctattcgcagtaaccgaatccaatttctaagtaggaagtcattccaagtctccgcttctgcttcaagtaatggtaatggcgctccaccgaaatctttcgattacgatttgatcatcatcggagctggagttggtggccacggagctgctttgcacgccgttgaaaaggtttgaagtttcttatataacctgatttgatgaaagtaaaagatttgctctgcttattatggaaacattggtgattttgtttgtgttagggacttaaaacagccattattgaaggagatgttgttggagggacttgtgttaacagaggatgtgtgccttctaaagctcttcttgctgttagtggtcgaatgcgggaacttcagaacgaacatcacatgaagtcctttggtctccaggtaaatatcaactcatgttctctgtttaaagttgcaagctttgtctttggtgtgaaatggttgtagaagatcgagctagttcaggaattactcattacctttcactatcgttatggtttttggttttcctttgggaaacag

SEQ ID NO: 49168 - DNA, 579 bp, Arabidopsis thaliana columbia
tgaagtaatttcttttgctttggcaggtactgttggtgggcagactagtcgatcaaaagctgaggaatctctcattgtttctctaccagcagatctttcagtggacaccccaatctctctgtggccacaattaccaagtccacacaactcaaaccaaatgatcactcacttccctccaggccctcctcattaccctttctatgatgtgaatcccatgttaagaggacccatttttgcttttggcccgcaccatgacgcaggagcaacccaatcacagtcccagaaaggtccagtaacagtatctggtccacctacgacctggcagcagcagggtcattctggagtagattccttctatgtccctcctgccggtttcacgggtccttttctaaccccacccggtgctattcctggcgttcagggacctcctcacatgtttgtttataaccactttgcacctgttggacagtttggagggttgagcttcatgggaacaacttacatcccatctggaaagcaaccagattggaaacacaacccaaacgtatcttcttctccggttggaggagatggtgatgt

SEQ ID NO: 49169 - DNA, 599 bp, Arabidopsis thaliana
ccaaacgtatcttcttctccggttggaggagatggtgatgtaaacaatcctaatgtggcttccatgcaatgtaacattgtacctgcgtctcttcagcaccttcctatgccaatgtttgatccatctcctttccaggtattggatcccatcattatgatttccaataatgctaactagtagaagaatccatcgacttaatatttattttatggtgtgggtcagtcttcttctcaggagatgcctattcgagcacggtggccttacatgccattttcgggtcctccaacgatgcaaatgcagaaacagcaggaaggaacagatggctccaatcttccatcacctcagtttaacaacaacatgcttcctcctcctcctcctaacagatatccaacgttcaagcatccacagttgtagacgcaatggtggactcctcaaacgcttacagttccaccactggtgctccaccagcaaagcccacctccacgttatctgatccaacagcaacaacactcagaatccaaatggtcctggcttcaaccaccacaacaacaacaacaacaatcttctcaggagaagacacgcagtctcacatgttggtg

SEQ ID NO: 49170 - DNA, 738 bp, Arabidopsis thaliana
tcccacatgagcttcaaacttgtcgtcaagcagtatattgtttgattttatgtcccggtggaagattctcggcttgcaatcatggtgcaaataggcgagaccctgagccgcacctaaagagattttaaatctcttagaccaatccaagttgcatgaaggatcatgaagtatttctccaaggcttcccttgggcatgtactcatacagaagcagatttgatccttggtgattgcagaatccatgtagcttgacgatgttacggtgcctgatattcccaagagttagaatctctgctctaaagctattatccacattgttgttgttgccgccttcatggtttgatgccagcttcttgacagctagagtgtacccggctggaagaaccgctttgtagacggttccacaagctcctctcccaactacaaagctctcgtcgaaattatcagtggctgcaactaaatcttggaacgtgaatccttcctttggagggaagtatatgtccaaagacatttccgatggttggccatcttgagcagaagaagcgactgttctcactgggcgtctcatgaggtagacaatgagagcaatcagcatgagagagaccccgccaatcacagctgcagtaatggctatgattttactcgaacgcattcctccgggcttcccggttgactgagaaggcgcgaaaggctgtgtttggatacactggttgagggcgggccgcaaagcccttcatta

SEQ ID NO: 49171 - DNA, 1139 bp, Arabidopsis thaliana
ggcgcatctttgcttggggcagagatgacaacctttttagcaccaccctgaataacaatgaaacaatatgatgatgatatagatcttaaataaacaagttctcgactattatataaaagatccaagttcaaaccttcaagtgagcagcagccttgtctttgtcagtgaagacaccagtagactcaacaacaaagtcagctccagcctcaccccatgggatgtcctcagggttccttcaaaaataaaacaccacaaatcagaatttcacaactctcaataacataacagagaaccactataataaaatcatccatgattatgtacctgatgccgaaaacagtgactggcttctcaccgaagagaagagttttgtcatccttcaccttaagctcatggtgcttccactgaccgtgaacactgtcatacttaaacatgtatgtctgcaacaaatcgataccatatacacaatcagtcaaaacgaatttacagagaatcaacatagaagaagaatacaacaaagcaagttctcagatctatatgataaacagcacacaccatcatgtatattaacaaaaattcagataaaactattaactcaaatccagatacgaactagtatcgaagagaagaagaaacgaaccatgtactcggtggtgatgaaaggatcgttaacagcgacgagctcaacatcatccctctgaagaacaactctagcaaccaaacgaccgattcttccgaaaccttcacgaagattcaaaactcagcttctacagatccaaatcacttaaacctaaccaaaaaacttatggaattcgataagaaaaacactcaccgttgattccgattctgatcttcttgtcagctacacaaaccaaaattacgatcagattcaaaaagtatcaacgaaagaacaataaatcgaagaatcgcagatcaacaagagcgagaagcttacccattttgcgaaattgagatcgagagagatttagatgatatcgagagagaagagaatgtgaaaatagtgagtgagggtttgggtttggtgaggatttagggttatttaaaagagaagaagaacgtgatgatgaaaattgaaaatatgatcgagtggctgagattttttcttgggaaaaaggcta

SEQ ID NO: 49172 - DNA, 755 bp, Arabidopsis thaliana columbia
tgtattagacgagtttactatgcaaaatttatgattctattccgcatggagcgtgctaatactacttcgaacccctttgagaccaatatgtgattctatattctatctagtacaaattatgagaagtatatacgtacgatgagagtataaaacatttcaatatttgtatagagaggacaccacttggttgacttgacccacgataagatattgaagaaaccaaacttgtatagtacgaattcgaaatcgtaattgatgatgcgattcgacaagtccaggggctccctcccacgcgcaatgggcccagcaaccacgtgtggccactagagagaataaaccattagcccacgtgatcttgggcccaatcaatctctccctcacattaaacgacaaaacaaaagctcttctgggttaaattgataaatatcaaaactttaaaggtaatttgctaaaatcgccacacaaaaaaagtcgcagaaaatatatgaggaaacaaaaagcgaagacgacaaaaaaaaaaaaaactctgatttttttttgttatctctctctatctgagaggcacacattttgcttcgtcttcttcaatttattttattggtttctccacttatctccgatctcaattctccccattttcttcttcctcaagttcaaaattcttgagaatttagctctaccagaattcgtctccgataactagtggatgatgattcccctaaatccttccttgtctcaaggtaattctgagaaat

SEQ ID NO: 49173 - DNA, 1032 bp, Arabidopsis thaliana columbia
ttttttttattgtcaacattcttgcctaacctagttattactattaaaatcgggtagtttgaaatttggtgataggaaagtagtagatgatgttgatgttcaattcttaaaataattgaaagattgagcacttattgcctaaatcaccgtgtttggttagtcataagactcgcgtatatttaatattgatttcttatttcaatgaattaagtatacaatataagttagatcaattattgttgtgatatattaagattgacaataggaggagtccgatcttagatattatattgacaagtttggcaaaaaaaaataaaaatattatttgttcaaatgaacaagttataaaaaaaaatgcagtagtttcaagtttggtaaaagaaatatgacaaacttaaacttgaaagtgtcagttttgtatcagcgttgacaaatacaatacttctttctctgtttgaagttagagagaactaattaggtgtctggctaacaaaacatgcatcacaattattattgttaattgtgaccacaaaatgcagtactaaaacatttcaagatttgtctttcgtagatagatattttaactgtttagatttataatattttttctgatgaagaggcaaataaaaagaagaagcaaatgctagaagaggcgcgtggaaaagagtcacaaggaagtgggaaaggtgaggaggatggggcatgtgtaaggctgatatgtcggcacgtagtggaaatggtcaaccttgacggctcccattagccgtccgatttaactaaaaagactcttttcatagcccatattctttcaattattattctctcaactctttctctaccaatacctagtacctacccacttttttacgaaattaacattcaaaagtatagtcgattttcagttcaaaattgttgaattttgaagtgatgcatattttcatgtttgcaagattcattatattatattttatactagttataagcactttggacaataacatattcgattgatcaatacagaaatgtgttttg

SEQ ID NO: 49174 - DNA, 931 bp, Arabidopsis thaliana columbia
  unsure (1)..(931): unsure at all n locations
tagacaaaaaggaaaaaaacaaaattaaaattaggaaagttaaaataattttcctgcaaatttcttctttctcagaaatctaaaaaaaaacaatgaagaaaacaccgtaacgaatcataaaatttctcaaaatccaaactctgttttttgttcttcctcttccagatttggtttctttttttgaaaaactctctagcttcagttttttttttctctctctctctctctctaggaatgtttttgttcgtggatactggaatcatgagaataagattttgaaggagaaagcaaggtaatgattagggttttcaagtattgggtattataaaagtgtcaacgttttttttttctctgcttcttcttcggatctaaacccacattacacgtttctctgtttttttttaatgtcagatccatgttctttgtcggagaatttagggctaatatgtggatttgagcttctttgattcccaatttgtgaaagttttgaaatttttgggaaagagagaatgtttaagcagtttctgagtaaacttccgaggaagtcttcaaaatctgattcaggagagctgaatcgttcgagttcgggtccggtatcgtctccggttcagagatccggtactagtggtggtggttcgggtccggttcgatctaactcagggaagcgtatgtcatctgctgtgttcccagctagtgttgttgctggtattgagcctttggtaccgtttaaggatgtaccaagctctgagaagttgaatctctgtgtgagtaaagttagtctctgttgtgtgacatttgatttctctgacccntggtaaaaactctgatagagaaagatgttaaaaggcagacattgttggagcttttggattttgtagcttcagggtctgttaagtcactgagccagctattcttgcaatgtgtagaaagt

SEQ ID NO: 49175 - DNA, 980 bp, Arabidopsis thaliana columbia
  unsure (1)..(980): unsure at all n locations
tgatctatatatcgcatttacacctattgacttgagcttatatggattagattcaaaatttggatgatttatgttatatatggtcgtttaggagtgaaaatgagctgaagaatgtttttgaaacagcccggacaaaacagctgggacattgggctcttttggtcgcaaggcagtgtctttcgtccttgattacagtcactggtggtgttgctttgagtgctctcgatgatctttctatctatcgtggatgtagcaggtaatctcccatcacatattcgtttcatcaaaaatgcatttatctttccattgaagtttagctattgcaatagacatactatgtgtgtaaccttcactgatagttgaattgtgaatcgattcggagtcttgacaaggctttattagcaagagactcgtttggacaacaggtttagataatgtttaaaccattttgttgaagtggtggctgagaccatcaattctttgaccatattttgttatcaatgggttggggtttaaaggatcaacttcgaaagacaacaaacgaaactcaaattctcctgctagtgatacatgtacgtgaattgatgctgtctccatatttcgattttggcttcaagctttagtgaaactggttaagcaaacgaagagaaagatgtgtagtctggtagtctatcttgtgcttgtgccgccactttacaaagtaatgatacttcttctacctgtcctcgttaggaatcgagtgaaaagtcagccgtaatatccagaacaaacatattttttttggatttctatacgcaccattttgttatttgttgccattctgtcatgaatttctctatgatcttctccttgtatcatcaaatcaataacatggacatgattttcaagaatgtagtatctgcattggcgattactcaaaaagtctttgtatgcttaattntcagcaaggcgatggagaaggtgatgaatagtaaggtgat

SEQ ID NO: 49176 - DNA, 650 bp, Arabidopsis thaliana
gaaatataattttcatatattatatcatctcagttattacaccatcatgtatatatatatatatcaacaacaaccagaataagatagcaaaaatttaaataagatgcatacaaagcatcaccaagagtaccacttacttatttaactctactacttatagtggtcataaataaacatccttaaacacacaccaaaagtaggattcaaacatatataggatgatcataaacagcaaacacttttctgactttttaacaccttgggatggggagtttgcaacttttagagactttacgagcgttgggagtgctgacgaagcgacggaggctagggtttctcatgtaaccacataagcatggcctctgctccttcagctttgcacagcacaaagccgatggtggagaagacgacgttatcgccgttgcacatgggcttagctgcattggcgagcacgtcacggcttctgccgccggggctagaatcattaggagaaccgccgctagagcaaaaagggaaccattgtggtcttgatcatcaccatgtttcttcttgatcttttgtttgtttctgagtttatagaaatgtgtttttggtgtgttgtggtttttgacatctcctcctatttatagagtgggaaagtgaaatgcttt

SEQ ID NO: 49177 - DNA, 1001 bp, Arabidopsis thaliana columbia
tttaatatgcgtccggatatatctctgtttgtttcgaggacggttttcaacagcgatctgagaggtgtgcttgggttagttagagttccgacgtgtgtgattcagacggcgaaggatgtttctgtgccggcttcggtggcggagtatcttaggtctcatctcggtggagatactactgtggagactcttaaaactgaaggacatttgccgcagcttagtgctccggcgcagcttgctcagtttctccggcgagctcttcctcggtgacttttttttatagatataaaaagagaacaataaaatataattggtggaatatgggtttagtggggtccacgtatcgaagaaaagaagggcctctatttgtggaggacagtttggcattgtcacaaatctagtaagataagattgttcacttgacacgtgactttcgcttttttatcactttttttcttgctctcttcattagtttataatcacaagtttatttcataaaataattggagaataaccaaaaaaaacattaaaaaatcctatcttatcttttactttcctctgaatatttctatccatattgttgtttcttgtaagttcctggaccttgtattgattgacgtctaacaacacatcgatgcaacaacaatctttagtctcaacactttcgattgttttctctaataaaatgatggagacaaaaagatataaagtatactagaaaattctagcatcacatcgtaaaagtatcaacaactaaaatgaagcaactatggctgacataatcttgatttaagttttatagtatgcaactatgcatgtgtgttctaaataattttaaagttaataaaattggttagttgtataatgttgttaccgtgctatatataatacaagttaagatttgagaaagtgagtgtgtgaattctagaagacaatcacacaacgaaaacacgtcctatcaatctaaacttttgagcaattcaaaatgcatacgaattgacagg

SEQ ID NO: 49178 - DNA, 796 bp, Arabidopsis thaliana
gcagtccaattagattcactatcacaagaacaccaaccaagaatccaccagcgacgattctagcgaaaattccgtaatcatcaccaccacgaaccaccactgctccaaaaactccagcaatgaatccacaatgaacaagatagatgaaaaccatcgaacaagccataagagtcttccctttaagcaactcataactcttcttcatcgcagccaaaccgtaaatcggttcaagaacagagactacactagctaaatgccacaaagctgtcatataaacatgaactacaagaaacagaacaaagatcactaccaacgaaaacacagctaaaaccacgttctgtaaatcaacagctacgattaacgtgaccaagaagatcaagaacacggtgttgtacgcaagcatcaaaagagagacccagaggaatgttatgaacaatcttttgaggacgagaggtatcgctgacattgtggaggagaaagaaacaggctttccggtgtaaagagaagcgacggtgaagacaacggcggctgtggagagaagagagaaggcgaagaggaagatgatgtagcagaattggaaaacgaggaggacggtccattcatgttggagttgagattgatcggcttgtgggtatgtatcgatctgagctaagattggttgtgtgaagagagaatgggctaggattgcgaaggagagagggaaaattagggttagggttatgaggtaaaaggtttttagagaatattgtgggattgatgttgattcacgtagaattcctcttttgttgagaaattg

SEQ ID NO: 49179 - DNA, 677 bp, Arabidopsis thaliana
tgcgtgcttccccttggataactctctgccttctagccgcactctcagtagggtcagcacaggtaacatactgcactgtaacttctcttagctctcccagaacttgatctctagaaggaatgaccactggtggggaagtagcctccagcgatccatgccgccagatgggtgggggtccaacttggagggggaggggttactggatctggatcaaccacatctctctcaagaggaggtcgtctggttctagaggagtcagaaacagcctggtgttgctcagagggggtgggggccttttccctccaacggagactgtctcggagatcaatttttcgagaagtgttatggggatgggaatgtgacgtggtaagcggtctgtaatggttacggccttgatggtccgtgtatctactatgagagtttcttggtcccgcagcccctgaggatctctctgctgatctaaacccacgtctctcatggcgatggtcagaagatctcttatgtgggtttgaaacttcttcagagaaggtaggttttgtagaggatctttggtggctcaatggtgccttgaaattatccgaggagtgtagtagttcctagagtccctttagaccaagagacagggccggagaggtagggattgcagacttcattttagaagtagtcaaccaggacag

SEQ ID NO: 49180 - DNA, 487 bp, Arabidopsis thaliana
ttccgtcaacggaagcgttgacttgttgccttccataatcatcttccacgtattctctaacgtctcgttacgtttcggtttcgcaactctcaacgctctcatagaattcctttctgaaaaattacgaaattaaccttttaacaaatagtgtttttagatttttataaaatatctaaattcggatgacgtcaccttagtgattaaatatctaaattaaattacctgctggtgtagtcttaaccaccggtttcttttggccgatcctagccgtaacaagaggcttctccaccggagtctgcattttccagatttgctcaccacaattatacacttcttctcctcctcctctaccgtcgccggcctctccttctcttcatacacaacctccggctccttaacgatctgcaaaactttgccgatgaaaccaaaatccgcatctttcgtctccgttcgtcgccttagaggagcttcttggacgatctgctga

SEQ ID NO: 49181 - DNA, 712 bp, Arabidopsis thaliana columbia
gccagtgtgctctagaggatgcgctccaaaaatatgtagacgacgattggtttggttttgatatatagcggatctttaaatctgcatagatatcaacagtttgtttggtggatcagattgaccaaacatgttataggttttacgtgtattaagcaaaaaaataaaaaaaaataatcaagatatctatatatgtccaaatgtgcatatgttgaagaatagtgcatggtggaaaatttgctattgtgctacttattgattttggaggcttttttgttttattaccaaaaaaacactcgtcgtttttgacctataactaatctaatcagatcagaaattggatgaaacaaattaatagtaatacctggtctaacactttcaaattcataactttgataggcgctatagttttcagaaaatgaaagataactcatatgtgtaatataatgtacctcacgttatttataatcacaaatacaaaattgtgtttaaaactacatggtgcgtttgcgtattacgatttacgaaccgacatacatctgatataggcacatagctagtgatggtttttgagttaaatgaaaaaaatgggaaattgattgagaaaatgaaagagacatgagaggaaacgaataaagagagacacgtggacagccaaaacaagtggatatgactttagccgcacgtgacgggtggccagtttgtgtcttgtggt

SEQ ID NO: 49182 - DNA, 1090 bp, Arabidopsis thaliana
taaaacaaaaaatgttttaatctataaattgtcaaaagactttgtgttgttttcaatagaaaataaaaactgtatattagtttttattattttcaatcataaataaacaaaaatttgaaaaatatttaaccaaatgatatagaaagaaattaaaaaatagttctagaggcaataaaatgaaatttaagtaatacattttatctggacaaatttttttctcccagacccagttatcgagaagcttctctcgaatatgttttctgacgccggcggaggcgcaaatcgtcggcgtcgggacttagctcttccgatcaatttgctttggttacttcttatgcttttgtttacaacttctgtccgctactcgaaaactctgtttcaaccctctcgaatcatttctccttcaccggttttcaacggcggccaaaaaaccagctacggaggaagacgatgtggtccggcgtttgcctcctgttccacctcttctcgcaaattcttcgccaaaatctttcttttccagcgatgcaatccctcaatcagaagcttttatcatctctccgccttttatttacagatctagatctgtttcaaccaccccaagagaatactcacaccggaattcgttgatggcaagagatgtctcttggaccgtcagatgcgccatctccggtggagtcgtcgtcggcgcacgacggtttcttcttatgggtgatggttccatggctctccgacaagcttccaaagcagctgcacgcttcaccgacgagggagacaacaaaagccaaaaccctaattgcaaatgtgggctcctctttgaagatgggcctctcttttcatggcccaataagatatctacttcggcccaattctgattttttgggtcaaacctaattaacttttggcccaggtccgttttctttattcttttggcaaaccctattttatttaagtcttctaactttgctgagaagaatggtcgtggactccattcttgcattgttatgacattgatagatagggttgttcaaattcatctaataatcctggtggaagatatctttaatgttgtcaatcgtggtaatccatctaa

SEQ ID NO: 49183 - DNA, 486 bp, Arabidopsis thaliana columbia
  unsure (1)..(486): unsure at all n locations
cccataactattagaaaagaaattgtatataaacaccatagggttaagttttaactgcaattagcattccgttatcattgttaacggtcgttaattcggataactgattttgccaaaatttaaaaaataaatgaaggttttttaaagacaaaaaagttaatttaggtattttcaggaaaatttaataatgtaggtattaaagggacaaaacatgttaaaaaaaagtattaaacggacaaattaaaataagacggtggtctttttggtttttttcttaatctataactaactacacaattcggtgtttttattttctctagtaattttaaaatttaaaatgcaataatagcatatattaataaaaatttcaacaagattacttacaattaaatgaaaaaaatattattataaatttaccagacaagaatcacgtttttcaaccggttaatcaggctatgatttgataatacgatgacaanaaaaaca

SEQ ID NO: 49184 - DNA, 665 bp, Arabidopsis thaliana columbia
tccacataagtggaccaggattttctcatactcacgggagagtttttcccacgtggatcccatcttcagcaatcagtgcccgttctacatgtgtccatgtggtcaaccccttgactaatcacagggctattagtcttataaactctggtatctatctctgaatgcttaacaacatcaaaacccatctgagaaggaaccaaaagcttggactgccatcctcctgaagacacttggtcaagcgcacttgtatggaccaaattcgaaacagctggttgtttagtccatggagactgtccaggctcattgttagcaactgatacctccttcctcccattccaaatattagagtgatttcctgacactgagttctcaatattaccagtcccagaatgagtcaaaggaccagctgcccaaccactatgcctcccagctaaaaccgagtctgctttcatctccaaacggttattcgcaaaccgaaaaacatcatcactgaccactctacgaggagcagagtgaccatccagaggcttccgttcatcttcactgaaattacgtccgatattgacattgtgaggcagaaacagtgatttatcatcgagatttctaatagcatgagacgaactcggtcttgctctctgatctggcctgccaattgaattccccaa

SEQ ID NO: 49185 - DNA, 591 bp, Arabidopsis thaliana columbia
  unsure (1)..(591): unsure at all n locations
cataaaggatgggcaggatagagcttgcaaaatttagattatttaaagagaacacttaaaagtcttcagtttttgtttgtcatgttaatagtccatagttcataaatcataatcaaccaaagtcaaagtctatcgatatccgaaataaaatattcacaaataatataagttttttaaactaaaatattcacaaatagatgtaagttttatggcaagaactaaaagcatctccaatggagagaccttatggaggggctctctccattttttatgattaaaactttttgaaaaattataaaagagcttttgattattttttctaggttttcatacttcaatggtagtctctcttatagaggttctctgaaaaaaaaatattattttaaaattattttatttcataaaatttaataattattgtaattcataaaatattaaacacttcaacatcataagtanaaatattatttaacacacgtggaaattaaaaaatatgttttgtctctgtaaaaacaagaactagtgttgtttgtgtctttgtaaaccaagaagtgttttgtctttggtaaaacaagaataaatgttggttgt

SEQ ID NO: 49186 - DNA, 907 bp, Arabidopsis thaliana columbia
  unsure (1)..(907): unsure at all n locations
tcaaggataccacattacaacaaagtaagtctcaccgggcatcattgttgattttgtaaagcatgaaattcattgtgtcttcccctttctttagatctccaagcagcatgagttagacttcagagacagaggaagaacaggactgagaatacagagctcggtgaagaactttcagctaacactcacggtgcatttccacaactttaaagctttgatcaaaaaccaatctcaagaatcctaaacattgtgtaatttggtataagcaggagactccaaggcagacaattcttcaaatggggagagttgacaaagcaagatatgtaatcgacttcaggtactacttgctcaaaccagaatgagccaaacataaacatacttataagcttaggattaaaggctttatcatctaaaagtcttttgctttatctgtttgcaggtatccattctcaggctaccaagcattctgcatttgcttggcttctattgattccaagctttgttgtactgtttgatcattaataaacggacgagttcaatctctgaacatccctccaatgatcatcatctgtataccttacttttctacataaacaattcctctatctgagtttcacaaactacctcagtacctctcaaatcaaattcaccatcagaggaaactgaaagtggacaactgttaaaaagattcaaactttattatataagattgtcacaagaaagaataatcgatgtgtcaatgttgattttcacaaccgagattctgaacaactaaaaaacaaaacttatcagaagaacaacactttagcaatcatttaactcgctgtagaaatcaggcgtaaggaaagaatctaaatcaccgaagantacatcatcttcctccagcagttaacttgccggagttttgaca

SEQ ID NO: 49187 - DNA, 553 bp, Arabidopsis thaliana columbia
tcctctagtaacggccgccaatagcctccatgatttctctccattttctaagtataatttttttttaaattgttagaagaaaactttagttttttctttttttttcatattccaatgatagttctcttaatgaagttcccagaagaagaaaaaatattatttgaaaattattttatttctttatttcataaaatttaataatcattgtaattaacaaaatattaagcatacattattttgaaatattttaaaatagatatgaaaaaaaacagaatatattattgaattgttgatcgagtaattgatcaaagcattgttctatgatatcatcgaataaactactagacgaagaagtcatatcgtttgatagcttgtagtataaaagaatagagaacaagaaatttaatgaatgagagagaaataagtctccatttgaaaagaaaaaaatacgcgtccaatcacaaaataacacgtgacaagatcctcaaattatcaaagctctctagagaaagtagggtctctcaattataatgagtttagatttattttttta

SEQ ID NO: 49188 - DNA, 1181 bp, Arabidopsis thaliana
aaggagatcccaaacaccatatcagaccatatgttggcaaatgctttccggttctctagtctccactcatcacgcagttccaaactgttgaagaaaccaatgggaggaacacaaaaagaaacacagtgaggctatcaaaagaaactatctggtacacgatcaagatgggtttacgacctttgacatcaaaagaaactaaaaatgtggagtcgagtcttacgctttaccccgcatctcccaccataaatcatcgtcagaaagcggcggagatttgccaatctcaacttcaagacggtacctagctttttctctattaagttccttaaccatttctagcttctgatttcgtctcacatcaagcgtctgggcagcaagtggtacagtcttcacatatctttaagtaaaggcacagactaaataatcaaactggggactaacacaacgtaaatagagacataacctggggaattaacagcaaaaatgaagaaaatcacctgtctaagaagggcataagtagataatcatgagccaaaaagtctaatgcccatggaatgagaattaagaccgccaaaaactttgcctgtaaagagttacaacgtcaatgagcattgatcaatcatctggaagaacattacaatcactaacaaatgaactaagaatcacacatatcatcaattaaggaacaagatcaacagagagagctatgtagcataactcaccgattttgaagaagcgtaacgaaaaatacggtcttcgtaaagaatatcttcctcttctgcacctaaaaccatatccctcaccattttaaccaaccctccatctggaattgtcaattcatcaagctctaaattgtcgtcactaccagcagagtctcgggtccaagactcaacaaaactatcatctgaatccacaatccaatcctcccatttcttggtcacatcagcaacaacaccactatccccaatctcctcctgaccttcccgtagctcgacaatcgcctctgctcgtctcttccaagtctcgaatttctcttcatcagacatctcatcatcctttgcaagctcagtagtctcatcaacaatgtcgtcgtctctcaaaccaagccaattcccatcatcatcagagaaaaacctctgccaccagcttcttctcctcttattattattaccggtatgactgtt

SEQ ID NO: 49189 - DNA, 1705 bp, Arabidopsis thaliana
ggtactttacaagggggttataaaggcacctttaaatggagtacgatcactgacgggaatgtgaaggcaccatatatcaaaaatcctattcaaatacaaaaactttaaaaataaagatcccttaacatgccaatacttcaaaattaaactacctaaaatcaaagttacaaaaacagagaaaccatactcttttagatacagggaatgttaaaaaaatggaaaagctaatagaaacttaaaaggaaatgaataaaacattacttactccccaagtttcttgtgatgacgaatgagacctagtccagtaccatcgatccctgcaagttttagttttctgagttttgttaacttgaaaagacttaacatttcagtgttccatggaaatgaaataaaacttcaaatccgtagaaactatcccaactcaaccaaactgaattatcggtatcgtgtctaggtcaagtccgactaatccggaggtgagcatgctctttgcatgttaccgcaaactcaccctaactaaagcacccggaccaatgcccaagaatccaagtggttacacgtgtataacaaccttgtttgaagtgtaatcaagttatcccatcgggaaccacattcattcatattacgatagaaaggcgaaagaagttttatacgacgaaccaggtaaaaagaggaggagaggagagtttggcgcttgagctctgcattccaacggagagaaccaacgaggtggacctcctccatccccaacgaaatctctcgcttcttccaaaaaatccaacaagctttttcgcaaatctccatcttcgaatacggattgtgcaccacgttttcatctttattcttccgtctccgtcgaatacccctagaaggaggaggaggagtggatgttacggatttgatctccgtgagtcgttgcttcgaggcggaggtccggcgtcgtcggagatatgacttcgttgaacagtaggaatcagttactcttgatgaagatgagacggcacagagaccgaagattgagcgaagtaatgtaacccccatttgtgtgagacttttgccgtttttctatttgtttataataagaacacgacaaactcgtccaagcaaagatgcgcggaaaataaaaacatagttgttttttattttttgaaaaagtagtacaattaagtataacctaaaatacaatttacaaactaactttagttgaactttaatttagttagaatcaaatttgtgtttgagagagtaattgagaaagttgtctttccatctttctgtatttaattagttagaataaaagtccacatttaccacctcttgtcttgcgacttgtatgtaagagaggttataaacaccaacaacagtgacattttggctctttttataatttatatacaaatttagacgtgcaagtttcctcttctgaatttctataaacaaaataaaatttacaaaacgttagttgaactttaatcggcaaggtgagccaaatctcacgtacaaataaatcgatatgacacaagatccaaatgattttagaaaactacctatatgtatcaaagatccgtttctttattaaaacatgcagttaaatgaaatatagtagtatacaaacaaatctatatgtcaaaaatttgaacaagacactccaaaaaagctagttacttgttgtcccatatatactataccatccaaaaatgaaagg

SEQ ID NO: 49190 - DNA, 858 bp, Arabidopsis thaliana
caccaaccaacccaagatgcatcggaaccataaacaccagacttacctccgtgtggattgttaaggatcgaagagagactttgactacttgcatcggagatcgatttggttaacggtgaaggagaagatgaagaagacgaagaaggacgaccaagatctaagctcgatcggttcgaattggtaatggaccttcccattagggaagggtgtgaatccataagtccttcacgaaatcaaaatcatgaaccaaaattgtggaaaaattcacaagttgatctggggaagaatcgaatttcaaaatcagagagatctttgggattttaagagtgtggatcgaatcgaattgtgtgtgtgttgtgagaaagtttggtgagagtttggatctggaagagaagctaaggaacggaggactcactgaggaaagtcctctctgggttcgagactcgatggttcgagagaggtggtgctgtgagcagtgcggggtttcactacgcagatttaatcgacggtgcattaggtatccacgtcatctacagaaaaggataaatgtcagtttgattctgtaattatgaataactgattttcattactagtaaaattaatattactatattacaaatatcttttcaattcaataaatcaaatagttctctaacaaaatttgtaatattctaattagttaatttggaaaaatgccttgttttgtttatacttttgaaaaatatcctatggatttttgtttgagttaatttggaaaaatgccttgtattttttttacttaattatgttgttttcatatattactcatggaaatttttggatcaagcatatgttaatattagaaaatatatattagaa

SEQ ID NO: 49191 - DNA, 937 bp, Arabidopsis thaliana columbia
gggacctttcggctccctaaggcttctccgacgttcttttgccaaaccattagccgttgttatagcctcagcgccggacccgtcatgcagcttgttcaccctaagtctacttacgccattgacgcctgcttcaattgtgcaattcgtacctctctaccgtagccgccgcactcccaacgctccttgcccaacaatctggaatcgagggttttctttgatgggccctgtctccaatgttggcccatttccctcgcggcccaagcccataaattgcgacccaaacctattatcacaaaaatccaggtattcctccatctgcaatttgccgagtctatcccaatgtagacatcgtttctttattttgaggggttagggacaccacttgaatgacgaatcaccctcgttgatatgctcctacaaatattatctgagaaccttggtgctaggtttagctagggcaatgttttatgattccgttttgaagattcatggtctagtgtttcttagtccaatctgtcggagatgtgacgctagtcaccaaaactctctatcaaagtatttcatactgacaactatatcgaccaacttcaagaacctcccattcaccattactccccgggtttggatcaagcttcaacatgaacttctcaattctcttgtgagagatccctccctattgactagtgcctcaaagtgatatctactcaatttcctcatgtctggccttttcttcatgtggcaaaccgactacaagctttgtgtggaattccttaatctccttggtcttcttgggagagaggacccacctgttctgttacggtctcgcatcaatctttctaagcctcgacgatcctccttcctttaccaaaaccttgttcgaacctttgcaaaagcactacttggtgtagtacttctcgtcccgacgagattcatgtcg

SEQ ID NO: 49192 - DNA, 894 bp, Arabidopsis thaliana
acaggtcagtgtattgatccaattggggtatttgtattagtttgtctctgtatggggtttgatatatgaaaatttgtggaatggtagcctcttcctattgctaaaactgatgtaagagttttctaacagaacaagtcaaagtctgtgaggtgcatctcatcttctcaagcctgcctttctttgaaagaccagctagaaaaatccaaagaagcagttttccagtatatggctttacttgagaaactgcaggttatatctggtttgcgattttcattttgtatctatgtttataaaatttacgttgtatatttagttgtgaagctttcctccattcgaaaatttcaggttgaaaaagatagtatagtctggaaggaaagggagataaatataaaaaatgaactaggtgatgtttctcgaaagacgtctgctgttactgattctagaatggcttctttggattcggagatacagaaacaactggatgaaaaaatgcgaatcaagactaggctgggaaatatatcaagagagcgaggtcacaaattgattactttgacttccaattctgtatctcccacccacacctgtttcactttggagtctgattaagttattcgtatgtcaggtagaaaagaaatctttgcagatatgaaggcattaatttcttcgttccccgaggaaatgagttccatgcgtagtcaattaaacaattataaagagactgctggaggtattcattctctgcgggctgatgtccagtccctctctggggttctatgtaggaaggtgggaaataatgtgaacagtgattgatgcttattgttacagtttatgttatgcttacttaataagcttaattggtgaacagacaaaagagtatgaagcattgcaattgag

SEQ ID NO: 49193 - DNA, 1166 bp, Arabidopsis thaliana
atatacatacactgatacacacgtatcacgtatacgcgtatatacgtattcgtagtttcgtacgtctctctgtaggatccaaaagcgtgcaaaggatatatatggtggataatgaaaccccacacatgtccatgtcaccaccaatccaatcccattttttccactaacatttgtaaccacgtgagactattcaaagactccatgattcaataacactgcatttgtatctatagattttctttcaccgttctttattttctcattggtttctacaacgttagagtcacaaataatgaaatctttcactacgtgggaaccatatatatggtgttcatcaaaactcttaacgtaatcctcaagctgtgcattttttccattagaacagtaacttgctctttacatgtgttgggagtttgtggcttatgtgagagagatggccataaaaaaagaaaagtaatttgtcaaaaaaagatgtaaatgttaataattgatggctttatgggctttttaacaattactgataagcccatgttatttcctaatctgtaagcccatatatctgagatttcgattgaagtagaaacgaacggttgaaattttgccacgtcacagtaaacattatcagaaaccataagtcctttaccagttagtcagattttacggtactgagtcgccatggaactggtgtctcttccgatccaccaccgtacggcgccgccgaattttccaccactcgaaactggaaatccagtagctaaccggattggacaagctctacgattcagcaatgttagaatgagaaagcccgcgtatttaggaacgatcttatctgagaaatcaagagcaagaacattaacgacggcggaacgagtttccggaagtggagtttcgcttccgccgcgtcttatacctgaggataatatccatttggtactatccgaagctcgtatcgaggtaagctttttcttcttaaccgcttttgcctaatccaagattagtacgaaataaattctgaaccggcattcagtatataaccgaattgcaccaacgtatatggtccgattttctcctgcttggttatgtctttaatttatttagacgaaactgtaacgaccggtctaggcatattgagaattgtgtccgtatgaaaaacaaacagacattgt

SEQ ID NO: 49194 - DNA, 1471 bp, Arabidopsis thaliana
tcccttctttaaaacttaataagaaaagatgtgatgaactgatgatagaagaaaagatgtgatgatagaagaaaagtaattttcgttacttatatgcatgtatactagtctagtgtgaaacacagggaaaccaatatattgattggataatacttccatctttattacttatgctagcgagcggatacaaacaacacacaatatagttaccttaagagacatcaaccacacaatataacttctaatctcttacaaattttataagttctagtattttcgacttcactttattattcgatacgaaattcttaaccagacgacattaatgaaaaaccctcataaactagtagtgtcttcaacatgagagattggttccaggagtgaccccaagcttcttgcagaagtccaagtaatggttaaccctgctctgcactgcagctggacgcccaccattacattcaccaccgttgatcctcctcgtggttgcaccaaacccttggctcaaaaccggacgcacattcttgttccaaaaccacatggcacactggaaagccacagttgggctacgagccaccatatctgggtccttcaagagaggaagtccaaggaactttccggctgcaccatagttgtagttccatgtgatttggatcggaccgcgaccatagtagttctttccgggttgacaaggatatgttgtgcttggtgagcagtaccttcctctggctatttcttctttgtaacaaaaacctttacataaccaaacagataaactttattttaaacttgttttagacacattcttggaacacattttggtaatatatatagctagcaaatccttatttcttatgaggaaaatattcctgtctctatatttttcttcaattatcaaaataaagtttttaatgcaaactgataaatcagatatttatataaatttttaaacatgataatactttaataattcctttttagacattttctgatacataaaaagaataatagaatgtagtaaacggtgaacttacttccagattcgtgagagaactgagccaacatggcggcaatctcacgcttagcaacagttcctttgtaggctgcgaacgattcagcggctgcgatgaaagcctggcgagtgtaaaaccctttcgctgggcaaccgcttccgactttactcatgatgctgttgaagaacgctggtgtgataacgcttgctatggtaccacgaggaccagcatttagaccgccactaccgcttggagtcggagtaggtttaggtttagagttgcaaggtccacttctgcattcaagtggtgtccctaacccctcaaaataaagaaacgatgtctacattgggatagactcggcaaattgcagatggaggaatacctggatttttgtgataataggtttgggtcgcaatttatgggcttgggccgcgagggaaatgggccttcagaatcgcatt

SEQ ID NO: 49195 - DNA, 518 bp, Arabidopsis thaliana
ttactttccgatttggtttgatctatctaattttagtcatataacaatgctagtggaaaaaggagtagcaaaaactataagtcacggaaagaagaaaaacacgaaattcaaaataaaaaatgtttacattaatataaaattaaaattgaaaagcagaaataatatgaatatttacatttatgggacccacatgtttgtatacttatatcacaagcacagaaaatacaagaaaaaagtaagaaaatcaatggcgacttcaaaggcggatgaagtatttatcgacttcagtggaatcgaaacgcgcaattcttttgtgagtcatctctcggccgctttccgccgcaggagtgtttccgtttgccttggtggagactgcactgacgtggtgacgccgcggaaaaccaatgaagggtgtaaagtctttgtggtggtcttctcagaggattacgcgttgtcgaaacagtgcctagatacactcgtggagtttctggagcgaaaagatgatgggcttgtgattg

SEQ ID NO: 49196 - DNA, 1340 bp, Arabidopsis thaliana columbia
catgaaccgggttaataaatcctttgtgagctcctcttcttccttcatcttgctctgttttatatttctcttcttctccatattttacttgatatgtttccgctttcttgtgttgatgacaaatgagacaaagcttgaacccttgagaggtgcaaaatcataacagtttcaattatatattgtgtgggttaaatggattttcaaacaatatctaacagattagattcgaatatgaaacttttttagaaacctccctgacgctattatcgagaacgctatattccatctcctctccgacgccggtggagctgaagctcgccggcgtcagaatctctctctcatttctcaagttgtttcctttatcttcaagctaaattttcgcttcgatttaattttcctcttttgcaatccctttaatccaaacctatcgaacctttctctactgttgaatcccctctttgcagcagtgcgttccgacatagttagacagtggcctctgagccatctacactctctgccaacactttgcgaatcaaagacaacagtgactgaatctttcgactccacttgcgttcaacttttctattttgagatttgtctccatcgccatatcgtccctagatccacgggccctctttgctcccaaggttttctccatcgatctgttgcaaaactttcagccgtggtttcatcctccgcgtcggatccgccatacagttttctcaccctgactcttgctttatcgaagatgtctgctccaacgacgcggtccgtacccctccaccgtagccgccgcgcctccaacgcttcttgcccagcaatctggtttctagggtttgcctttatgggccctataaccattgttggcccatttcccctgcggcccaagcccatattttgcgacccaagtcctttaccaattaagcccaggtttgtttctttctgcaatttgcagagtctgtcccaatgtaggcgtcgtttctctgttttgagtggccatggacaccatttgaatggcgaatcaccctcattgctatgctcctgcaaacagtctctaagaaccttggtgctaggtttatgtagggctatgctttatgtttgctttttgaagtctcttggtctagttttgatgcgtccaatctgtcggagatgtgacgctggtcaccaaagccctctatcaaagtacttcatgccgacatctatatcgaccaacttcaagaacatcccaaccatctttccttcccgagtttggatcaagcttcccgactacaagctttgtgtggaattccttaatctccttggccgctatggacttcttgtgagagaggaccacctgtttt

SEQ ID NO: 49197 - DNA, 525 bp, Arabidopsis thaliana columbia
caatcatatttatatttgcaaaatatagtaaataatatatctaaacatagaaaaaattaaaattaacaaatacctattacactgtgaattatatcttacgaaattaattagtcgctatactaaaataaaatttagacccgtggtattccgcaggttaaaatctagttatatcatcaaaagtataaaccaaaattttgttaaatgatgttttgtggtttattttgttatattatttgtggtatattttgttattagtttttggaaaaactatgtaagaaattattgattttatttgtttattaaaagaaaacaaattgaatatattttttggtcaacatcggtcaacgccggtaaacatcagtcaatgccggtcatcactggtcaatgccggattctggtcaaagtaggatgcttatggtgttggcacatgacttctgtttgttcgtgtatgtccgtatgtgatgtcaatacttcgtgtagctaacaaaatatttttaaagtctgcatgtatggcgatgtgttggc

SEQ ID NO: 49198 - DNA, 607 bp, Arabidopsis thaliana columbia
actaaaacttataaaagaaaatgattgccaaaagtaaaatgtatatgttgttatattacaaaaatttgataacaaaatatagtacacaaaaagaatttgttgtctgctttgttatatttatttatcttgttatatcatcaaaagaataaaccaaaattttgttctataatgtttttgtgatttatttttttatattatttgtggtatattttgttattaggttttttaaaaaattatgtaataaattattgtttttatttgtctattaaaaaaatgaaaaaaattgaatatatattttggtcaacgccggtcaacatcgttcaacaccagtcaacactggtcaatgccggattttagtgaccgggatatcaaagtaggatggttatggtgttggcaacataacttatgtttgtttttgaatgtctgtatgtgatgtcaatacttcgtgtaggtgatgagacatttttaaagtttgcatgtataacgatgtgttcgcttatactttgtgtatatgataaacttttttattctaaaaccgtttaaatagcataaaatcggttaggcctagattaataagtggtctagcgctttattgacgttagtattt

SEQ ID NO: 49199 - DNA, 532 bp, Arabidopsis thaliana columbia
tttatactattcagtcataaaaaagaacaaaagattgatccgaaacgataacggaataatacccatatatatgctaacgaaggagcctcctatcctagcctaccaaaagtagaagaaactgaatcaaatctaattccattttcttagaaaactaactccgaacaaagttgagaacacaatttattaaaaaaaaaatgaatatgttgtttggtcaacattagtcaatgccagattttgatgatcgaaacatcaaagtatgatgattatggtgttggcaacattacttatgtttgttcgtgtatgtctgtatgtgatgtcaatacttcgtataactaacgagacatttttaaaatttgcatgtgtgacaatgtgttcggttgtacttcgtgtagctgataaacatttttccaatattaaatggtagccaatttaaacgggaacaccaaactcggaatgcacgaaacacaccaaaacacccaaatattaagcaacacatgctatggcaaatatcttctatgagcttacaacagat

SEQ ID NO: 49200 - DNA, 957 bp, Arabidopsis thaliana
tgacaagacaggaactctcacgatggggaagcccgttgttgtgaaaacaaagctcctgaaaaacatggtacttcgagagttctatgaacttgttgctgcaactgaggtaaacttttggaaactcctggcctacatcaaaagtaatattactatgttgatgctattttgtttatcaggtaaacagtgagcatccgttagcaaaggccattgtcgagtacgcgaagaaattcagagacgacgaagagaaccctgcctggccagaagcctgtgattttgtgtccatcactggaaagggagtgaaagccaccgttaaaggtagagagattatggtggggaacaagaatctgatgaatgatcataaagttattattccagatgatgctgaagagttgctagctgactctgaagatatggcccagaccggaattcttgtctccataaacagtgaactgattggagttttgtctgtttcggatcctctaaaaccgagtgctcgagaagccatctccattctaaaatccatgaatatcaaaagcatcatggtaactggtgacaactggggaacagcaaactcaattgctagagaagtcggtatcgactctgttatcgcagaagctaaacctgagcaaaaagcagagaaagtcaaggaattacaggtacttgagtaaaagctccacactaaatgttaaaaagttcacatatatggaattgataaaagcaatgaatatatattgcaggctgcgggacatgttgtggcaatggtaggtgacggaatcaatgactcaccggctctcgtggcagcggatgtaggtatggcgataggtgcaggaacagacattgctatagaagcagcggatatagttctgatgaaaagcaacttagaagatgtgatcacagccattgatctttcaaggaaaacgttctcaagaatccgtctcaactacgtatgggctctcg

SEQ ID NO: 49201 - DNA, 753 bp, Arabidopsis thaliana
cggaagagattccatgggatcgagaaactgagattcctcatcgtcttcgaaaggattaggacctacttcaaaaggggtcgaagaagtgaagtaagaagcgacattgcatagaggacagtatggaggagaagcggaaggcaatgagagaaccctaagacctatgttacattccggacacgtgtaatcccgcatctccaattggttttgggtagaggaggacgacattgagaaggtggttggtggttgaggaaatttagaagaaacaaatgagatcccttaagattcttataatctaatgggaacgtgtgtaataggaaagatggctgcgtatcttcaaagttttggtattcttttctattcaaagattaaaaaaattatgagtgttattttgttcatatagcattggtcaaattgtattgattttatttatttttaccaaaatgtatctgatttccctttatattgatactagtatttgctaataagcagctgtcaaacttgattaaaattccaaaaacatgaatttattatgaatagaaacaaaaatctaaatattggtaaactgatcttggtaaaaaatgttaatagagattttttttcttaaaaaaatcactaatttatttctattagaattctcagttttacatttcttaaataaaaaatagagaattaataacttagttttaaaaaaaaatacaaaatatgtagatttgatgtcccagaaagttgtggtgcatctcaggattttgaatc

SEQ ID NO: 49202 - DNA, 666 bp, Arabidopsis thaliana
taaattggaatagtgatgataaacttattttctggccacaatttttgtttcgtgtatagagagagctcaaagatggaaccaacagaaaaaccatcgaccaaaccatcttctcggactctacctagagacactcgtggctctctcgaagtattcaacccgtcaactcagctgacccgacccgataacccggtgttccgtcctgaaccaccagcgtggcaaaacttgagtgatccacgtggcaccagtcctcaaccccgaccacaacaagaaccagctccatccaaccctgttcggtctgatcaagaaatcgctgtcacgacctcatggatggctctgaaagacccatcaccggagacaatctccaagaagacgatcaccgccgagaaaccacagaagtcggcggtggcggctgagcagagagcggcagagtggggattggttttgaagaccgatacaaagacgggaaagccacaaggagtaggcgtgaggaactctggtggaactgagaatgatcctaacgggaaaaagactacatcgcagagaaactcgcaaaactcttgccggagctccggtgagatgtcggacggagatgttcccggcgggaggagtgggattccaagagtatcggaagatctaaaagatgcgttgtcgacgtttcaacaaacg

SEQ ID NO: 49203 - DNA, 559 bp, Arabidopsis thaliana
gtatcataagggctaaaagatcccaagcggaagccaagggatagagctgaacatgagcagtttttgttacaaacttcaaatccgagattccgatgctaccatcctcatagtaaatgtaaagtttgtggtccttgagggcaatatcactacaccccaacaaaggaggaatctggcgccattcacaatcgcctttcttgcaaaaggctgcatgcttgtctccaccccagctgcaagcaactacgtagtctttagttttctcgtctatccacacaactgccttatcagtactagggtatccatcatctcggctttgcttgcaaaatgaccttttctgtagagtacgctgaaaagagctggtcacgttgagactcgatagctactaggttaatcctctccaaatttagcacattcacaagatatagatttaacagaggagccaggtgccgcaacttgcaaggcaaggatccacaccaaggtcttgaattgtgtaaacgttttcttcttcctgtggattgtcaacatgcaactgcgtctgatttgtgctggatcagggaaaaga

SEQ ID NO: 49204 - DNA, 550 bp, Arabidopsis thaliana
tgatttgcatagatcaggatgatgctagacacagttttgggcattctggaggtacttatgtcctttctttttcccaatgttttgtagtaagcatttcatttggcaacaaaccaaaaagttcagagttgtaacttagaactctttttgttctacaggcttcatttgcccgtttgttccgcttttgcctatagtttgcattcttatcaacatgtatctcttggtaaaccttgggtgagttatggatcatgacaccagatttgtgaatactactaaccgatgacttcactgttgatatacatttgttttgctaatgttttagagctgcgacgtgggttcgtgtatcggtttggctgttcctcggagtggttgtttacattttctatgggagaagaaacagctctcttgtgaatgctgtttatgtctccactgctcatctccaggagattcgtcgcacttctggacattctttggcttaagtctacatgaaaccatcaatggaagctcaaggaagtgggagtttcctttgtaaaatatgttcaacaaaatctgt

SEQ ID NO: 49205 - DNA, 1340 bp, Arabidopsis thaliana
gattgttgtacaatactcaaagacaagaacattatactcacaatcttcatgtaagtatgccaatcctttagctgcacccaaagcaatcttcatcctctttgaccactccattaccggtctctctttctctacaaaacaaccaccataattcaaacaaaactgcgggaattcacgcaagcataactgaaaacaagtcttttaaaaaaaactcaccgtgtaaatgaaattcgagagtcttattaggcacaaactcataaacaagcaatctttgagcaccagtgatacaataaccaagaagagaaacaagatgcctatgatgaactctactaatagtctgtatctcagcttgaaactctcgttcaccttgtccacttccagatttaagctgcttaatagcaaccaaagttccatcaacaagaactcctctatgaacataaccaaacccaccttgtccaagaaggttagtgttggagaagttactagttgctttagacaaatcttcatatgtaaacaagttttgtccaatctctgatgaactccattgctgaagattattgctatcatctacaaaaacagaggaattgaataatcattaaaaaaagattgagtctttggaaataaagaaaccctaaataaagtacctttgggatctagtgagtctctgttaatagaagcttcgatatcttctttcttcttcttctttaacttcctcttctttcttttatagaaacagacaaagatacaaactccgagtaggacaaacgtagctccgagaactactccagtaataagtccagttaatgctacatttctcgagcctccatcaatgtttgttgttgtctccggaaacggagccaacgaagaaggtccgatgatggatggctgagacggagctggtgacgtcgccgtgtctggtgtggtggaaggaaactccggcgccggtggagatgagagggaagggatagtgtcggtagacattagatcagaagatgatgaggatgatttggtttttcaggcgtgtgtgcaggtttttctcatggcggaagtgaagacgaagacgaagacgaagaagacgaagacgaaggagaatgaagaaagggacatgcggtgggtcccgtcccacttgagagatttgttcttctggcaagtgtctctttaattctctcgtcactctgtttctcagttagtcagttaacacttaccaaccatcaaaagaagaactaataaagagccaaattcatcttatgttttttatttaaaaatataatcattaagtcaacatttttaaaataataaaatttactaatgatttttagaatctttaagaaaaatttaccata

SEQ ID NO: 49206 - DNA, 450 bp, Arabidopsis thaliana
tgaataattttgtataatatcatcaacaatgcgaaaaacgtcaccatagacgaatcttgaaccttgtagattcttgtttaactcttctacgagtgttttcagcttcagattatacatttgtgcaacctcattaggttcggccaaacagttatttccagcggctggatcagactctctctcgaatgggtatacaaccgatgggaccaatattaatcaccacgattttcctcgcacccaattggtacaatctctgccaaaaccatataaattagtttgatcaaaccggtttggtttggattctttttagttgaagttagagaagagaattattacggtgagttgtaatcgaaattttgagatcattgtatcaactaagacttctggagctactacttttgcgtcgaagggttgatatgaccggagtgacataattgttgattagatcattag

SEQ ID NO: 49207 - DNA, 463 bp, Arabidopsis thaliana columbia
gctgatgagattggaagaatatatgatacttggattgggcagattggtaaacaacagtagagaggtcgcttttttagatttgtaattctttaacttgtagttattggacgatatagcattttgattgaatattgctctatggctggatgataacattggtttacttgatcatttggacaggagaggctcttggtttggtacgagcaaatttgtcattttattgagcatgagatgaacaatgaggcctatagtactgtaatcaggtacaattgatatcttcttgaactagttttaaattggatgttaggatttcatttttaatgcatatgttatattgtaatgtgtatgatagttttgtatgttcagctaattatatggagatagtcagtcttttatccaccaatgtgtaattccaccttcctgagggtggtttgctacgttcttgtgtgaattggttttgatg

SEQ ID NO: 49208 - DNA, 657 bp, Arabidopsis thaliana
tagaggatacaggatccccaacatatttaattagatcgaaatgtaaacgtcaatagccaccccgctcaaccctatatagatgggagtttttccctatacggttcatgcatttatcttgaggttagcgagttgccgaatattgatcggataaatatcggaggtgtcgccggagagtagacgccgagcaatgatgatgttagcagcttcggtaggatggtaaggatcccaaaatacatatttggaacggtccatacatacttttgaaggtggaccacatggaatcagcccacctactttcccaactaacgaacaacaaggaatcttctcactctcaaaacctacaatatcaaatcacaaaattcatacgtttaaatctgaaagaagtatcataacattattaagaagtcaaatggttgagtttacgtaccgtaagatgaataattttgtataatatcataaacaatgcgaaaaacgtcaccgtagacgaatcttgaaccttgtagattattgtttaactcctcgacgagtattttcagcttgagattatacatttgagccacttcattaggttcgacagaacattcatatccagccattggatcagactctctctcgaacggtatacaaccgatgggaccaatattgatcccacgattt

SEQ ID NO: 49209 - DNA, 418 bp, Arabidopsis thaliana columbia
aatgaatgagcaaaatgtagacctatgagaaaagatgtcgaaaataggggaattttaactaattgcttacctgtctattcctcacttggtgaggacaacctgcaggtatgaagactgcttcgccgaggtgttgctcaaaggtccatggttctatatctgcatttgaagaaatacatatattcaccgttttcgtagcaaagatgaatcaagaacatagtctggttaagcggcacatgttttaagcataaaccagaatcttaccaaattcttctttcagctgtttcttctggctatcactcaagaacatagtctggtcatgaattgggtgaatacctgaaattaaacagtgcaccaaatttttgatttttcacacattagtgactaattcaatattaatcatttacaagagacgtatgag

SEQ ID NO: 49210 - DNA, 335 bp, Arabidopsis thaliana columbia
  unsure (1)..(335): unsure at all n locations
cctcgccccccccccccccactccatcccccccccctgtcgtcatacggcgggtagactgacatgcctgccgcgtctgcccctgacacgactcactgtcggcagatgcactctgagacgcttgactctgagtagactgttctgtagttcacggcagnggttgactgataggagactcttctgccgtagtgctttgctgagtagaagaagaagagctgttgcctataggacnatgatccaagcctgccgtacagacagtactctactgttatctcaacacaacactactagaaggtactgaattttgatgattgtgatcttgattttctgttgaag

SEQ ID NO: 49211 - DNA, 431 bp, Arabidopsis thaliana columbia
gactcggccttcctcggaaatggtgtgaaccctttctgtcttaagtcctcaacaatatcggctttcttcctcttgttcactatgatttctccactgagaactgcaagaataaacctcgctttgttttctagtttcaacagctcaatttccatattcttcaccacggtttcctgtgtacacatcataaagaacgttaatgttagaccattgccgtaaaacctctaaaagacttgaatcatagtttcagtttttctaacctttctcttctcatagtattcaaacctgaggtcaaagaactcttcaaggactgcaacgtgagatgtaacattagtatgtattctagagaagaaaacaaaaaacagaatgaaaacaagttggatctcttcttactttgttctggggtcacatatttctttatcacacctttttta

SEQ ID NO: 49212 - DNA, 443 bp, Arabidopsis thaliana columbia
aggcgggatctaaggagtggatatcgatgaagcacatatggggagcgaactggtgcatcgtcgaaggaccactcaagggaccattctccgtgaagctcacaactttgtccaacaataagacactctccgccaccgacgtcatccccagtaactgggttcccaaagctacttacacctctcgcctcaacttctcccctgttctctaattagcctctcttcaaaaaaattttgttgtgggagagaggaacacagagaagacaatgagtgagccatctccaaagttaggggattaagagcttttcattgtgtgtgtgactactaacactctatgttgtcccttttcatttttttccttctccatagggatgtgtgtatcatctataatgttgtttgtgggacattactatataagaatttacaaaagatgtaataatgtaatatgc

SEQ ID NO: 49213 - DNA, 592 bp, Arabidopsis thaliana
accaaacttgtaatcccgtcacgtatcttctgtcaccgcttgtgtgagtaatggaaattcgatctcgtacttgcttgtcaatccatctgattagacgtaccggtgagtttggtagttcaccatgccgccggttattacgttccctccagatggtataaacggcagcttgaaagacatagcgagctatgaagcccgttgttcgatcatcctgccaatgtcctgaggttgctgcgatcaagtcattccagtgtgtagtatactttgctccatagatgttccaagctagagcctgccaaatttctgaggcgtaaacacaagagaaaaaaaggtgattacgggttccagcatgtggttacaaagagcgcagcctgtggagagacccctgttccagctgagcatccgatctccagttgataaacgattgtgagccgccatccaaacgcagaaggagaatttgggagtccctcctgcaaaccagacactcttatgccatgtgacctctgtcgaaatagaacgtgtgtggctccaagtatcacgtgctgaaaactgtggccggaaagtatcgtttttccccttccaaagaaagacgtcc

SEQ ID NO: 49214 - DNA, 752 bp, Arabidopsis thaliana columbia
acatcatcttattagtgaacactttcgtcttctgtgatcaagcccataacatactgacagagaaagagagaagttgtttaatttttcgatcgaaacgaaaagaaatggttccaattttcctcaaccaacttccaagtttgacaaaacaaaaaagcggtttaataacctaaacatcagaagaagaagaagtttggttctttcgatatcttgcttaacaagcatatactcctctatgaaccatcacggaacctatcaagcgcatcttgcttgccattaacgtagaactccactgcagcttgcattctttcgagtttatctgaatggtaattcatatgaataatcaccggcttcagcttcttcatttcctcatcctttctcaccgttttgaagaggaccctactgttcatgaactcgtacacatccatgactctcttggaagcgtataagccagtgtatccaggatgcgaagggtaaaagaggtgctgattgaaaactgcttggtcccatccccccgacttagagagtgtatctgtcacccgatctagtagctcgattgaaggaagagttggtcttagatagaaaaaccctgaattgaaaacccatatcctgtttgtgtagacagtccgagaccgtgtcatggttgggtcatcaaacacatcgttgaagccataaggtgtgttattgtcatgaccatcgctcatggactccacatgagagtctctgtacagatgagcaaaagggtgctgcaagaa

SEQ ID NO: 49215 - DNA, 485 bp, Arabidopsis thaliana columbia
tgccttgtttttctaagaaactaagatttgtttattcgtttaactggtttggtcacgacaggtgattgatctttaaaggcgagttacgtctttttggttctcgtcttctgtttctgaagaggcaagttctctttcctccctttttggttactagctctttcttgttcttgcaactcttattcacctcttcttatagaagtccatggtttttcgtgtttcagagttttctctaacttagaaatctcttttcctctgcagttgtctcttcttgccttctattgctgataaggtgttttgaaagaagaaaaaaagcctaaaatgagcaatataaagctaggagttgaagtgataagcgcacagggtctgttacagagagataagcataactcatgtagccctttcgtggagctcaagttcgacaaccagatattccgcgcaacgaccaaacacaacgacccaaatcctgtctggcacgagtgttttta

SEQ ID NO: 49216 - DNA, 1163 bp, Arabidopsis thaliana columbia
taccttttttcttaactcgaggaagaagaagatgattgggtttttcgatatcttgcttaacaagcatccatctcttttatcaatctgaaccatcgggaaagctatccaacgcatcttgtttgccattaacgtagaactctaccacagcgtgcattcgttcgagtttatctggatggtaattgagatgcacaatcactggcttcaacttcttcagttcttgattctttctcactgttttgaagagtaccttactgttcatgaactcgtacatatccatgactctcttggaagcgtgtaagccagtgtaccctggatgcgaagggtaaaagagttgctcgttgaaaaccgcttggtcccatgcctctgacttagagagtgtatctgccacacgatcgagtaggtctattgaaggaatagttggtcttagatagaaaaaccctgaattgaaaacccatatcctcattgtgtgtgcatacctagcccatcccattgatggttcatcaaacacatcgttgaagccataagccgtgttattgtcgtgaccatcactcattgactcaacatcagagtctctgtgtaaatgactaaaaggattctgcaagaagacaatgtccacatccgatagaagaacactgtaaccaagctgcaagaactctcttaagacgcggaacttcagtccggaaacagcgtgattacctccgctttttccaaccatgtccactgctttatctggatctcgcttgtaaaacacaacctccttcgattcgcagaaactttccatggaatcatccaacgcgacaatgaggtagttttgaataccaactctctttacactagcaatctgcaactccaacattggtttcacatttgaatttgcaagaaccacaatgatctctttattgacagctactttctctaaaagcttagctaatctggggttaacagactcgtcgggaacaacagttggattagtttgcagacccgtgacaagtgccaaaagctcttgccttgatcacttctttttgttccgccaaccgtaccttttctgttaggtcactgacctgcttccttaactcgccattcttttcggagatgattgcgaattctgctttgaacatcttgacccgttcaggcgattcacatgaagccgttgcaacctgaaa

SEQ ID NO: 49217 - DNA, 400 bp, Arabidopsis thaliana columbia
tgtcctatcacttgaactcgaatatttacttctacgaattgactttgcgaaataagctaatatatctagtattatggtatcccctgcatatgtattttacattgtatttaacctggattttgaaatcagttgtaaaagtaactgttgaggacatatattatattgtactttgtttaaggctcaactatactttaggaggtcatagatgtgtgtcctagtcaatttgtgtcgatgaacagtactcattgactttgattgtgtgcgatatcgcgttagtttgatttgaaatgattgtgaccatacacttcagaaaatcgaaatgcaatttgaccggaatataaaaattgtgcagtataattattaatccatgtcacaagttgacatggtaacaccattgttt

SEQ ID NO: 49218 - DNA, 590 bp, Arabidopsis thaliana columbia
gtacattgataataaagcttgcatgattctcttacacaacatacacatacttacttactactttcttacacacttacacacacaagcatgcttttaaacacataactaactctagactcttgcaagccactctactacttacatattcttgcatactactctccttaagatagaaccatagttgggcttaaccaagtagcccaacgtctccttaagacaaaacagtaagcccgatctcctttgttgacttgtgtcttcctcctcttaatcgttgactcctctcttcacgtctccaacgtgtcttcgtctttgcttctgctctgttcttcttttgctttgcttctcatcttcatcacactgattcatcttttcttgttgcaggtttgagcacaggctcaaacgctaacagttactttgtttgttgaattcatagtttactagtccatgtagcttagtgtgttggatcaatacatgatcatatcaatatttaaaacgttaaggcttttgttaaagtgaaggctttgtttttgttcgcctcaaggttgtaacagatttgttctttgtcccctcattaagaattcatgcttaga

SEQ ID NO: 49219 - DNA, 491 bp, Arabidopsis thaliana columbia
ttaaaatttaaaaattagtttaaaaaatcgaccggtatatccaaattcaaacataagttttaccttaatgggccaacatatgggccttaaaaggctttggatctgttactattacactccacttgcaaaaacctatcttcttcttcttcttcgctgaacaacaaacaacgcttcacaaaaccttccgataaacctcacaaccctcttcctcctcacactacagtaagaaaaacacgcgcgaaacgtatggtaggagcttcaagaacaatcctatccctatctctatcatcttccctcttcaccttctccaaaatccctcacgtttttccatttctccgcctccacaaacccagattccaccacgcgtttcgtcctctttactgcgccgccgcaacaacttcttctgcgacgacggagactaatgttacagatccggatcaattgaaacatacgatcttactagagaggcttaggcttcgacatttgaaaga

SEQ ID NO: 49220 - DNA, 424 bp, Arabidopsis thaliana columbia
tcaagagcctcccacttgacctcatcatcgaagatagggtgacaaagtttgttaaataggttcctgtaggcttcagcttccaaacgacgtcttcagtggcagggagcctacatgcgacgctcccaatacctgcgttagcagactctgcttgatagtaatactgcaggcaatctccttcttgaaagatatcttcactggatgtccagccttgtgccacatagcgtcccttaaggcttcttcatcctctttccaccaagataattggtcacagagagaaaaaaactgcctctccaccgcggaaaatgctctcttcgacttgtcattgtagtggtgggaagtcgtcaccaatgagtagccctggacgtgaatgactccatgtgagattaagagcagtcgttgaaacactttattttcggtttcagac

SEQ ID NO: 49221 - DNA, 513 bp, Arabidopsis thaliana
cgactctagactgaaaagttcgtagtctcgattcagtcttcttgtctaatcaaaccacacaccaaccggttcgatctgcgagtcttccttcaagaatccatccactctctgttaaactcagaacagctttgagccggctcagtatctggcggagatcttcttcctcaatctcggtttcagcttcgtttgggtatgagacggttctcgttggactcgtgaacctcactgagctctacggttgcgtgcatgagctacttgagtctccttacgtgaaacacactcttcttcatcaccaggaagggaaacttctggacgaatctttagatggatctgttctgttgctcgacgtgtatgaggggacacgggaggtgattgtagcgatgagagaacacgtgacgaatctcaaatctgctcttcgtaggaaaggtagcttagagaaggaggcgaaacactactttaacttgcggaagaaggcaaagaaagaaatctctaaacagattaatgcactcaaga

SEQ ID NO: 49222 - DNA, 1226 bp, Arabidopsis thaliana
ttgcttcgtcatcattccttgaacgtagtacgctatgctcgactgacattatgccctatacaagtatatatattcacacatcagattataagtattatatggttccgtatataacataatttatataatcatgagaaggacaaaccgcataagcagaggcaagaaggttcatgtcaaagccaatgttccatgcagaaaggtttggctccatcacaaacgttaaggctgtggactgtaacgtgcccatgaaacacaccatcgtcgataatgaaaggtgagatgagtatctcttcaacgtagccgcctaaagaaatgatgaaacataattgtcctaattcgttagaagactcccttatttagatatagtactatcggatcactactattagatatgtatatattaatccgtagataaagatacttttagaaggggcttcacgagttaaagagatcagtcgatgtaaaatttaaatgatgtacctgaagaacgaaaaaggaagcccaagaaaatgaggcgatgaggaggaagacggtggctttgaggtagtcctcacctgccggcgacaaagcatggccggtgaggtgagatcggagaaaggtgattagaggaattttgaataaaatcatcaacatggctccaaccactatcactaatgtccccaccacttttgcttggaatcttacttttctcatctccaccttctccatcctttatttttttcaccaaaatataaaccacgcatcatcatcaacgtaccatattgtatgaattaacctattgtatttggctaccgcaatggataactaataataaagctatgcgttaaatttaggtacctgcaaattatggaaatgataaaggtcaaagctggaacgatatttgtgactgcgccggcaaaagttggtgaagtaagtttgagaccggcgtaatataaattttgatcgatcaaaggcctgtggtaaataattcataaagtattcatatactcatcaagtgcatgtttttgaaaaataattcaaattttaagaagactaacccgagaagagctagaacaaaaatctgcatgaatattggaaatgtcatcttcggcctcactttcctacaacaccattatcaagttatcaaatgtttgtatttgatgagaatcaatcgaacttttttaatatatatttctataaaatatgatacctctcggagagtagagcagaaggtgcgatcgagccgt

SEQ ID NO: 49223 - DNA, 511 bp, Arabidopsis thaliana columbia
tgaacaagctctgagcatatggtgagattccactaatcagtctcataactttgcttagagaggagacacgtttatcatcatcatcatcatcattaaccatcgtcatcatgtcgacgtcctccttctcatctagttccatcgaagaggatgccgtcaaagacggtttggactgacaaaggtctcgtttaccatcgtaccaccgtggaatccaacccatgactccccacttggtagctttaaagtcgtatccatgaatcactccgtcgtcgttacagtccttcttacatacagttttgaaataaggatcgtcggatatatgcgagttgatagatcgatccgtgcattgcatcattgccagagattttggatctaatttgaagagaatctcttcaaggatatgaaaaggtaatccatccatgattgatctaattaatatgaaaaagagacaaaacaagattagggctttttgctccgttccgtgatggtgactattccagaagttttggtgatg

SEQ ID NO: 49224 - DNA, 593 bp, Arabidopsis thaliana columbia
ttaccatctccacacgaggtaatttatgtttctgttgttagttgttactagtttgccagcatgagttgatgcgtaagagtctagttagctcctgtttgagcagttggtttgtgcatgtgtcatagttatcttttttgttttattaactaggaaaaactgatcaagtatccttttgataatgcagcagggattaagtgctcacatgttaaataatgccccaccatccactattcccatgttacagcaacaacagcaggcatcaatgcaacagatgtatccgcaggtccatgtttcgcattttcccaatctcatgccttatcgtcaattcctttccccagtctatgttccccaaatgcccatgccaggctactcaggtaacccagcagcatatgcacacccttcaaatggcaatagctatgtgctgatgcctggaggcggttctcatctcggttcaaatggtgtcaagtatggaatccatcagcaatataaaccagttccaactggtggacctgcgggttttgggacttacaacaatcctaatgggtatccaattaatcctctcaatgtagttggacacgctactggacttgaag

SEQ ID NO: 49225 - DNA, 776 bp, Arabidopsis thaliana
cctatttattttaatcattataattcctctaattacggatactactaatcactgccacatgcaaatggatcggtcaaaatcatcaactttcttttattaaacaaaaaaaattatgttactagaaatagaaaatgcaaagaaatattaaaactttgactttggagctctcaagtcgtctccctccctctattaaaatagctaccaaatgcttctctcactcccacaacacaaacacacattaccaccatgaactcttgctccttcaatttattcatcttaggtgctattatctttctccggtgttttcgttccaccggagctgccacgtgtgatcctgatgacgaagcgggtcttttaggtttcaaatcgggtataaccaaagatccttcgggcattctcagctcatggaagaaaggtactgactgctgcttttggagcggtgtcttttgcgtcaacaacgaccgcgtcacacaactaagtgtggatggagacttttctcttgacggaaactctccctccggcactatctcgccgatgctggccaaacttcaacacctcgagaggattcttctcacctctcttcgaaagattactggtccttttcctcaattcattttccgattaccaaagctaaattacataaacatccaaggttgccttctctctggtccccttccagccaacatcggcgagctaagtcaattgaaaactttagttatcgacggaaacatgttcacgggtcatatccaagttcgataccaatttgctcggttact

SEQ ID NO: 49226 - DNA, 1068 bp, Arabidopsis thaliana columbia
actgtactgactaggcaaatcatagtctacagactccgtatctgcacctcccccacggagtagagaagcttcctggtaaaatgtgcgctcaaatgggcccccctgaaacgctctatcagattctgctgccacagacctgacctgagtggaaaacaattataaagcagggcctataaggagtatggtatatgaaaccaggagataagttcccaacaagagtaacacatttcacatgttaaagaaacaacgcctccaccaaaaaactgctagttaaagaattccaacttcggctttgcacagttgaaaatatccaatgattttgtagtggcaccatctaagtcatataatattactataaatgggttacttctagctctcagaaattgaaccaagaacaggaggatccttacctgcttgtagctaccagcattgcctggaatgaacagaacaggaactccactaagtttcttaaggtgttccttaaagtcaatcttcctccaaccttcatggtaaagataaagtccatatcttccaggagttgtatcatccgtcacagagataggaatgtaagtaggatacatgtaagtcatagtacaaccattctttataggtttagcaaaccaaacaaagccacaagcccaatccatgccgctaaaatcaaaacgccaactatcctcagccttggtcgaatgctcatagcaaatcttacatcacgcatttcaatagtatatatctgcataaaaatcatctcatattcaattaacagaccagtgtcaccaaaatcctccataataaaaacagagaattaaaaataagacatatatatagctcctaaaacaagaatacataaaactttttcgtatcaaattgaatcacacaagtgttatagttacattagttagcttagatctcaaatcagtagggttttctctgctctctcctctctttagcgtcgcttcctgtgaaaacttgctagatctaaccattttcaagctttcaagagtactagagtgaaagtgctcttgtttccttgatctatgaggaagtattttgaagaaagtgaggata

SEQ ID NO: 49227 - DNA, 641 bp, Arabidopsis thaliana columbia
aaaaaaaaatccccaaaagcttcctcaaaaccctaacacagatctctcgatcttctccgatctgtcttttctcctaatctggtaacgtttcgattctcgattcatctggtttcgcgtataatgtttccgattgatttcactttttcgattacgaatctagatctagggctttgatctaatgttctgagatgcgattacgagtttccgtctaaaattttgcagtgattcgtgttttctcgatatcgcttatgagaattgttttctaggttttaggaatctattggttcatatgttccgataatcagatctttgaattcgagcagtggatatgattcaccgtccttgatttgtgtatttgagcttgaattttataattattgcttgatctccttcgattttgatggcgtgtgttgtcattgtgttggtggtagctaattgtaattttctaaactccaatttgttcaggtttagtttgattttattggattgaagatgtcagacgctttgaatatgactcttgatgaaattgtgaagaagagtaagagtgaaaggctgcagctgcaaggtctggaggtaaaggagtgttccgtaagagtggacgtggacgtggtggccgtatggtgttgaagaagtggagagga

SEQ ID NO: 49228 - DNA, 779 bp, Arabidopsis thaliana
cgataaacccaattttttattgtttgttcttttcaattttacatttgttcggtagtccacaagttatattcttcaatgtagtttgatgcaattgaaatgtgtaagagtatttgaaagttacatgtgtttgtgctatgcagaaacaagctacctcgaaccatcgatgccctaacgtatctcaaagctgtgaaggatatttttcacgacaataaagagaaatatgagtcattcctggagctcatgaaggagttcaaagctcagacgtatttttacttcgcttctcttcttgtttagtttcattttgcctttcttatgtgttgtattgtggatgtcacattgtgaactgcgtatactcatggtgtcttatcttggttgcagaatcgacactaatggtgtcatagaaaggattaaagtgttgttcaagggttacagggacctacttttgggttttaatactttcttgcccaaagggtataaaataacccttctgccagaggaagagaagcctaagatccgggtggatttcaaagacgctatcggtttcgtcaccaagattaaggtatggatgtaatatggtactaaatggcatactaaggtaatgatgatttatatcagttaaggtttactggggtttctacttttgcagacgaggtttggagatgatgaacatgcgtataaacggtttctagacatcttgaacttgtatagaaaggagaaaaagtccatctctgaggtctacgaagaggtatgtttttttattactgcacagagtgttaatt

SEQ ID NO: 49229 - DNA, 439 bp, Arabidopsis thaliana columbia
tgaaagtcctgaacctttggtgatgctatctgtgtaagccccgcagcatcattcaagttgtttctctgagacatggttgagtctgtcccattcatgttgttggtcagaggaatgccaaagagcctgcagttcccttctcttgactttgctgtctcctcttgtatcgtgaagggttgttttgttacttgctccctagcctgagcttgcgcttgagcattgaccacttcctcataataattcaaagcacgtggacgtattggccagttaccaccagcattctcagtcgatagaccattaagaacaggatattcgctgtatttaacattgcatcgccattggagagacgcatcagttgctgcaggtaccttaggagattcatgtaacttcagggagagaccagagtgtatcatctgccactggttagcaagataatcgaact

SEQ ID NO: 49230 - DNA, 1334 bp, Arabidopsis thaliana
gtatatggttacaattatttacgttcgcaatgtgcctatgatgtggcaccaggtggcctcttagccagcgtgtatcatcttacgagaatagaatatggtgttaatcaagcggaagaagtctgcataaaagtatttactcacaggagtaatcctagaattccatccgttttctgggtttggaaaagtacggattttcaagaacgggaatcttatgatatgttaggaatcacttatgatagccatccacgactgaaacggatcctaatgcccgagagttggatagggtggcctttacgtaaggattatattgcccccaatttttatgaaatacaagatgcttattgaatgataaaaaatgagccaataggatgaactaaaaaaaaagagttctgcattatgaactttgtatcgcgcacataacttagtcaactttagtcacataactgggaatgaataaataagatcggaaagcaataaatgaagggggggatacaattctatttctattgtatctaatgaaccttggggtatttttgcccttcaactatagtatactatacatatagacctttttttacttgtttgattcaacggaactcatttaacctttcctttcggatatgtattatgtatcaagtattatacattctttttgaacggctggattcacaacatgaacaaaaaaaagagaggggataaagcataattgcactttttttactaaagatacgtttaatttgaagaataaaaacttatcaaaattaataaatcctctgccaagaaccagatttgaactggtgacacgaggattttcagtcctctgctctaccaactgagctatcccggcgaaggatcatcctcgttttacgaatggtggcacaacgatttcaagtcccccggaaaaaagctatgtccaccattagtctactgaagtatcaagtatcatctactgaagtatcatgctcgttttcctaatggtgacacgaggatttcgagtcctctgcaaaaaagctatgtctacctttactgaaggatcattatcatgtgacacagggattttaagtcccccgcaattaagctatgccgaccattactgaggtatcatctactgaagtatcatcttgcttttactaatggtgacataaggattttcagtcctctactaatggtgacataaggattttcagtcctctgcaactaagctatgtcgaccattaccgaaggatcatcttgcttttactaatggtgacacaaggattttcagtcccccgcaattaagctatgtgtaccattaccgaagtataatctactgaagtatcagtatcattttaata

SEQ ID NO: 49231 - DNA, 613 bp, Arabidopsis thaliana columbia
taacgtatccatttttatcgcaagaatctagggataaaactgtatatatagagcgaatgtctgggaatcacttgtatatatttgatgtaaagttgcaatgccaatgtttaaaaatcacataacatagtttatgtattagtctagaagcaaaaactaaatagaatacaacttttggtaaacttattaacttttactcattcgtttatgagctagaaagtatattatacccttcataaggaaggattccaagtagcagagaatgtcaatataacacaatctcgcatacatagatatatagtttaattattaaccacaactattcattcacttatttatgcatttgtaatggacaacccaagtagttaaatagaaatgtttgaacacatttatgggaaacttgtgacttcatattcatgctctattttcagaggagattccttggaaacaggccgctctttagaccatagctctaagttaacagttccacagtcccagtggataatacatttgaagacctgactaacatcgaaccgtgtttaccatccgaagattgaggctcttgtccaccacatccattccctgaaaaaaaaaaaaaaagcaaagattgttgcca

SEQ ID NO: 49232 - DNA, 368 bp, Arabidopsis thaliana columbia
tgagctcctcgcatgcttcgcttgccttggatgttcttagattgatcttcaacatattttcgtgtgacccgaaaagagaagttgtcaatgtgatagccaatcttcttttggcagtcacatcgttccccgaaaccagcatccatgcatctttcctcttactcctcttgacagattcttccatggcttcaacgattgaaggaagaacatccttttgccatggaatgttctcagtgaagcttttccaataatttactcattttaatcgctttctctggttcttcttcttccgagttctctgaatcagatggaaatggagaatgaccaagtgcaagagtgatcttagtttttacaccttcatcattgttact

SEQ ID NO: 49233 - DNA, 1346 bp, Arabidopsis thaliana
cttcgcaacttcctattgctgcgatttactaatatgatatcttatcaaactggaacaccatagagcatggcggaggaatcgtacgacgaagagtgcgactacctattcaagtcggtgctgataggagactccgccgtcggaaaatcaaacctcctttcgaggttctcgagagatgagtttcggttagactctaaaccgaccatcggagtagactttgcttaccggaatgttcgcgtgggcgataagactataaaggctcagatatgggacaccgccggccaagaaaggtatgatactactataacggacttgatgatgaagacatgatcaaaatttctgtatttaacgttggactaatatttttgcacagaaaaagaaaacgtaaataaatgaactcacttccattaattgatttttcattgaccatgaacaaaaatgcttgttttgtaagagtttttttatttgtataatttctaacgtaacaaaccaagacgtcaaacttgttaaattttcgatagttatttttgtgtctaaatgttaaggtaaatatgctagataaataacaaaaaaataatgaatgaaatttgggattggaatgatgattaggaaaatagatcacgcgcagaagaaaatctttataagcaatcgatgtcacacggacctaatctttgttaaatgtcacgaccatttcttctttttgtttttcttactaaaattatatttatttcgacaaattttatctttcatttagaattgtgaatttctttaataatttatgtgtttttacttatcttaaatataatagtgttttattttttatttttgcatgggaggaaaaaagatttagagcaataacgagttcgtattaccgtggagccttgggagctttactaatctacgacatcacaagacgaatcactttcaaaaacattgagaaatggttgtaggaactcagaggcttctccagtcccgagaatgtcgttattctcgtcggtaacaaatccgatctcgggcagtctagagaagttgaagaagaagagggtaagaatctagcagaatcagaaggtctctattttctcgaaacatcggctttagagaaccaaaacgttgaagaagcgtttctaagcatgatcggacggatacatgaggttttgactcagaaaatagttttagacaatagactcaacggtgacggtaacaacgatagtaacggtgctgtcgttccgcccggtaaagagattgtgaatattcatgaagttaccgccactcgaccgttgagtacttctttgtccaattgttgctacaagtaaataaactgatgatcatctatattaatattgttatat

SEQ ID NO: 49234 - DNA, 443 bp, Arabidopsis thaliana columbia
cacttctcaccttcattgatgtctcgattagcgcctccaacgttttcaacgtcgttagcttcggtgccaaaccggacggagcaccgattctaccggagcattcctcaaggcatggcaaggggcttgtgtctcagcatcttcagccacggtggtggtccccaaggggacatttctgttgaaggtaataacgtttggaggaccatgcaagagcaaaatcacatttcaagtggctggaaccgtcattgctccggaagattacaggacctttggcaattctggcttctggattctcttcaataaggttaacagattctcactggtcggtgggacttttgacgctcgagctaatgggttctggtcttgccggaaatgtggtcagaattgtcctgccggtgttagagtatgcatctctcctctatctctagtttgaactttttagtgtt

SEQ ID NO: 49235 - DNA, 534 bp, Arabidopsis thaliana columbia
  unsure (1)..(534): unsure at all n locations
tataatcaaatagaattattaaagtgagtacaaatacatgtatgaaaccatatatgattaataatttttcttgatgagccttttactcaatttgtttatgggccttttcctctgcgggattttgaaggaggtacataaaaacgagggggaggaggaggaattggtggagacggaattagtggagatggaattggtggagacgacatctttttacctgataacaatattgaagatattgtttcattaaataatttgcaaccattaaatatacaatcaaagaatcaattgaaaatatacatctgaacatttgcaccatgacaataaataaaaaatgagtgcaaatactaacgttcgtcgcgtttggcttctgtgaatccaacttgagaggagataaatagaagtagaagaagtaaagacaaaagaagagaaactaaatgtgatatctttgtagccatttatggtccactttgtcttcctacggtagcganagaccatctcatgctatcgatctatatatagagagaagtaacgaag

SEQ ID NO: 49236 - DNA, 531 bp, Arabidopsis thaliana columbia
gttcaaatcttgtgacatgattttggcttaggcaattaggattgtggaatttactccttatgattcaaaatggctaccattttatgtggggattttctaaattttctcttaagatgtaaaattgtgcagtagttgtatgttcattggttctgcaattagtccatatgttatgttgaatagcttgggtgatgattcctttataacatagaaggataggctggaaatagaaaaaactgcactcatgactgatactaagtgaaatgaatactcttgttttctttttctctttgtaaaggtcttgtgggagctgtgacaagggttcaagaccgcgtaaagattttcctcgcagtgttcttttggatgtttctcttcttctgggttacagtcacagatgggacgggtaaaggcaaaggcaagaagggttcaggtttcaagtagtttccatatatgaagaggctttggtgattatctactactctatactgtatatatatcaagacttcaaagagatcaaattacctgtataaactt

SEQ ID NO: 49237 - DNA, 794 bp, Arabidopsis thaliana columbia
aatatttcttcacaagtctgattattatatacagtaacgccaaacacattagtcatctctaatctctatgcttaactttatggtaacaagtaagaatatgtgatcaaagtggtagaaatgattgctctaaagtctaaagtctaaacgaagaactatactaatagagcgtgcaactaagccttagcattttaatttctaaaagctttgattactataatacaaattttatagacttgctccccacctttttctctcttccttgaaagtttaagccttttgattaattatgagtttaagtacaccttccacatcatcaagcaatgcatatcatgccctctcaaaaagttaatcttgtaggggtgggcatttgggtacgcgagtcagtttttggtaaaacccgatcgggtaagtgtaggtataaatttttagacattttttagaactgatacctgaattttttggataaatacccagatttccctgatctttggataaaatttagataaaatttagttattttcgggttctagttgagctcgaatttttgggtagaagaagtttaggacccaataagatagatctaaattttcaggtttggtttcgaatccaattttttgggtcggttccgtgttgttttttaaaccctaatctagagttttttttttgtttaatatgaaaacttagtacttaactttctctacttgtattatagacttgtaagaagttaataactataaaattcaattgacaatgtttgagatataatctctttggatatactcaattgacaaata

SEQ ID NO: 49238 - DNA, 321 bp, Arabidopsis thaliana columbia
ctaatagagtcggtgtaataactaattaccttgttctaaaactaacatgataaaataaaattcgttttagcatatacttacatcatgttcaatatcaattgtaagccaaatgaaaagcaaagaaaggcagaagcaaaaaaacttcacatagccttttagcctcaatccatgacttgtttcttgttgttgttgttgttgagttatcttcttcctctcgacatgaactctattagcttcttcttctttcctttcttatggtaaacgatcttttgcttcacctcttctcaggtcttctcactttttcttttggaagtttaatga

SEQ ID NO: 49239 - DNA, 429 bp, Arabidopsis thaliana columbia
ccccgtcttcgagtttagcaaagagattaggcgtaaaggaagagggatgcgacagagcaaaccttcttactacagagaagtgagcgaagatgtcacttgaatgagcggtactaggccttgaaattgctcattcctagcccgagtaaggatagttagttacttatgacgactatctttcttggtttagcttcattcattatctccaatggcactttgcttaattcatattatatgttatttagggagatagagcatcaattcatcaagatcgaatcgattacatcaacgagttacgcagaagagtaagtgagcttaggtatttggtagagaggaatagatgtggtggcatgcacatgaactatgaagtagacgacaactttgacagtcataacgtggatgatcatggttatgaagatgatgatgatgatg

SEQ ID NO: 49240 - DNA, 531 bp, Arabidopsis thaliana columbia
catggtccatttggctactatccccataactggaactggaattaatccagctaaaagctttggtattgctgttataaaataaaagactttatttgtactaaaataaagagacacaaccacattttgaactatctttaaaattatagaaagactcagactatttttatttatgctgatttaagcatactaacataaactagctatcaatgcaagagagatacaatctggtgaagtttcctcgtttggcatgggaccctcgactggcgaaccctcccccggtgtagattgtggtggttccacggtttctttcaattcagctggactgtcaatctgtcattaatctctggtggttgctgagacgactcgtctcgagcttctgccgtcgtcatctgcgccttttccgccaacaccgtctcaagagtagcttacgccggtttcaaaggaggaagcttttcatcggcgtagtaaacctaagcccaatctcacttgcacaagattaaacaaactcttcttctcctaaggataatatat

SEQ ID NO: 49241 - DNA, 595 bp, Arabidopsis thaliana columbia
cgaaataaaagctactgttaaccaaatcattcttaaaaacaatgattttgggcctaagcaaagcaaaacagattacatttaaacagatctttgattcttgtctattgaagtcaagatcttccaatcatgatctcaagatcgaatctttaccacaaaatagtaaacctccctaaaaccctagagggtaaaaaaaatcagctaaaagagcaaattccaaacgcagcaacactttcaaaccctaaaactctcaaatttcatatttgcagtggtataatggaaaagctgaaatataattattaccttcttcttgggcacagccattagctccatggatccaccgaaagagaaactcaggaaaccgaatctgaagttattttcatcaatgatagaatccgattgttaattataaaactccggtaaaacaagcggcggcgaagcggtagagcgatcgatggcgctgtctaagggaggagaaatcgcagcgacgtaactgaagcatcgggattctaatatacgccggaaatcagcagcggcgcgttttagcgtcgtcagtctcaacgccattggttcaaattctccggtggctttgcggagg

SEQ ID NO: 49242 - DNA, 865 bp, Arabidopsis thaliana
gtagatattgaatcagagggagatagtgtggctgctccccactgggttggttccatttttcaacttccgtttttcagttacaaaatgatctcgtcttgaacactgacgttcagtgtcttgtttggaagaacaatactgctggtcaccacaacctcgtcttcaactgcaaccgagtctcctgtaaccattatgtctgaggttagttatctgtctataaagagattttgctttctgtatataaagagaaggagctacaatggaggaacagtttaccgagaattgtaactccgagtttcgaattgtagactccctcagcctgtgatcaacaaagtacaacttcaggttcacgattgtcaaggaatcagacatcaacatttcaaggtccaaaaagaatgagtcaggctcttaagagatgagcagaagagggaaacatgcctggacgcgggaccatctcccgatagaagatttccacccaacaattgcgttagtcaccactgcattttcctgggcaaagagtcactgaagggtcaacctcgagaaaatttaaccgtttttcactttgtgtcttgtataagtagacataccatgatctcaacatcgtcaaggatgatgcagctcataagcctgacgcccggtccaacacgagcatttgcagagattgagacgttgggaccaatctgttaatagatgaaacttaatgctttgtgataaaagtggaatcagaagaaattgcttcaacgagggacaaaaccatatgtaagtacctttgcagttgggtgaacttttgcagaaggatgtatgtaaacatcaccaatcacaatggcactccttgttccatcaccactagccaacagttggggagatg

SEQ ID NO: 49243 - DNA, 457 bp, Arabidopsis thaliana columbia
tttcgttagtcactcgctcgtaaaaagaaaaaaagttgcattggcagattgttctctaatcatatcgcattacatacctaattcacacgcgattccatttgacaatagacaaaataaaagctgcgtttaacatcccatcataactttataaaacaatccaatcataacacaagacaaaggcatgttttgcccaaaacacgtatatcatgacgttcctaagttaatattaattctatttcgacgaaaaaagaaagacaggcagatttacttaaaacattgttacctttaagagattattcagatatgtttgcctaggtaatacaccgctccagtcataaacatgcttatttggttgactaaagtatttatcgacgaacggagttgtgtcgacgaagcacaaatcgacgatctctgttcagttaacgaaattcacaaaaataaaaaaataattggagga

SEQ ID NO: 49244 - DNA, 630 bp, Arabidopsis thaliana columbia
gaacacgcaccaccaaacaacacttccattgatcctcataataatctccaccaatactcatttccctcttggattcttcaaactcctctctgaaagttctcatttttggtttacatttcctttgagtccactgttacttactaaaatggtgagcaaatggaagaagatgaagctagctttgagtttgaatctctgcaactatctccccagaaccctcgaggaggaaccaccatcattggctttgaattccgctgagacattatcagatgctgctttgctctctcctcttaactggcccatgactccaacaccttcttcttaccgtcgaaggttgtccagaagtagcagcaaatcgtcaaaggtttgtttcatcatgacccatattctcaaatctctttaattccaagaaagattgctacttttggttcctgaaatactgacctgttctttgtggttcatgagtttgtcttggataagtcgtttgctctgctttcgagctattgtgtgtagttagttgtaatgaagaagagcattgtgtctacttggaagtcctatttttgtatcagttaagccttatattcctttatagacatttatcatcacttttgccctgtttaaaatagaatatag

SEQ ID NO: 49245 - DNA, 566 bp, Arabidopsis thaliana columbia
tcaataatttatatattaagtattttattatttgagatatttttttccaacaaaaaaatattgggtattaaacgtccaaattatatttattttgagtctcttttaggatttttcccttaaagtttgtgagacatcaaaaaaaccaatgtcattgtcttgtctcaaacattactaatatgagttcttaccagtgttttcacgcctgacctagacttactggttaacccacaatccgaactttttttcggtttgggtttagtactagaaaccggtaacttcaaactgggaaaattcgtcattaatctgctaaccggttgaactggtcagatataggttgtaaaaaaaatcattgagcaacttcatcgccggagatgacgatattctaacatacaaactgcgaaattttaacaatcgtaataaggccattcctataactctataagagaatcaagactaacctttaagagcaagtcaactagacgagacgaagcgccaatgaccaattttttttgtttttgaaacctttcacctaagcggacggaagtttcgtgggctttatttaaata

SEQ ID NO: 49246 - DNA, 534 bp, Arabidopsis thaliana columbia
  unsure (1)..(534): unsure at all n locations
nnnnnnnnnnnnnnnnnnnnctaaagccttctgtcaatgaaatggctgaattgttcgatatcatcgacccgattgctattgcgaagtacgcgacactcactcgtactctggcgactgaactggcggatgagctactggctatttacaacgcgaattaccagagcgagtaccgtgttgagcatgaagatattgcaaaacgcactctgcgtaatgcctgcctgcgtttcctcgcttttggtgaaacgcatctggctgatgtgctggtgagcaagcagttccacgaagcaaacaatatgactgatgcgctggcggcgctttctgcggcggttgccgacagctgccttgccgtgacgcgctgatgcaggagtacgacgacaagtggcatcagaacggtctggtgatggataaatggtttatcctgcaagccaccagcccggcggcgaatgtgctggagacggtgcgcggcctgttgcagcatcgctcatttaccatgagcaacccgaaccgtattcgttcgttgattggcgcgtttgc

SEQ ID NO: 49247 - DNA, 692 bp, Arabidopsis thaliana
gtagagtcttgcattcacccggatgcggcgtttcatcgcacatttcatttccgaaaaccattgaggaaacatcagttatcagaaataacatgaaacattttacaattactccacgtttcatcgtttgatgtttcactaaggtaacatataatatgaatcatggtttttatagacattttcccataatatataagttacaaattggattggttttaacttttaaatgtgaactaacgcatgttgcagtttttttttttgctaagacatgttgcagttctaacttctaacctcatggaatcttgacctcctactaattaaattgtctttgtaggttttgttccatcaaagatctttaaagtcccatactattatatagagtacattcataacttatgtatactaaatagtgtaaaatatcaataaagaaaacaactaaaagggaacaacacagattaatccgccattaaaaggattaaacctcagtactagcaatatagtaagtaacaagaggcaagtcatcagataaagttaccctaaaagtagaagaagctcaagttgtgttctaaaataaagaaaagcgtacagtaacattcagcttcaacaatcctcctaaccattgtacagacagtagagagttaatctggaaacctaatcttccatctggaaactcaaactcagtcgattggtaaaga

SEQ ID NO: 49248 - DNA, 541 bp, Arabidopsis thaliana columbia
  unsure (1)..(541): unsure at all n locations
nnnnnnnnnnnnnnnnnnnnnnctaaagcacagcctgataaggacgaaagttttgcagccaccttgttgaataaaaaacagtgcaatcaacaacgccacagggactagcacccataacgtgatgcgtacgagatcgacccaggcattcccgagcgtgctcatgctctggcgggtaaacgcacggatgagggcaaaaatcaccgcaatcccgctggcggcagaaagaaagttttgcaccgttaagcccgccatctggctgaaatagctcaacgtggtttcaccgctataagattgccagttggtattggtgacaaagctgacggcggtattcagcgccagatcccacgacagccctggcaactgctgtggattaagcggcagatagtgctgaccgagcaacataaaaaacagcaccgccagccccagcatgttcaggccgagaatggcacaaagatattgcttccagttcatctcacggtcagagacgccaagtgcgcgaaaaagtacgcgctcaacgcccgttgtactgggaagaggaatg

SEQ ID NO: 49249 - DNA, 576 bp, Arabidopsis thaliana columbia
tgtacgcacatgtaattggttttctctataaaaataagaatcttctaacttctagggcaactaagtacaaagaagtgagatatatacttgttttaacaaaaactaaagaatttcaggcgcatgagcaataaagtagataaattgtgtggtataatatactatattaagaagaaaaaaaaagatagaggatgcaatgtggggatatggcattggagagagtgaagtagtaagaagacgcgaagaaggcgctgacaaatctcaaacccaaagggagaaagcacgagagagagagagacaagagattgttgaattgaatgtgcaaagagagagagagaaggatcggagaggcaatggcatgactcttgtggacgcaaacccatgtcttaaaagatgctctttgtcggctctcatgctcttcccttctccacgtgcccttctccttcctctcgtttgcattttggattagcaatggaatgctcaaaatatgtgtgtgtgtatatgtttttgctttataatttatctaagttatgtagttgaaaattttatttaagcaaaatactacaaattattaactag

SEQ ID NO: 49250 - DNA, 652 bp, Arabidopsis thaliana columbia
tcatcaatctctgttcactctgcactttcctcagacgactccatcgccgtccttacgagttcatcgagatgaatcacatccgcttcaggaatccttacgaaattaggaatctcttgagcattagaaactcccaagtctttacaaaactcaaaatacttttttagctctcctccttgcttcatggatttagcagcagtgctttaaatgccaggtcttgcctcttgttttaatcaaattggtaagtcaatattcgtaatgtttactgaaaaaatattatttgtagttaaagttacattaatagtaagctaaataaatataattttatagattggagtatgattcacaaatatatagtagttttataaaatacacaccatagtaaatatatgtatgtgtatatatatgatatatcaatttaataaatgttaacgtagtgtttatttgataatgatttttcatatttaatattcttataaagaggcttgagactgtgattgtaaactgtaactttaattttgattttataattaccgtaaatctaatatataaattatatattttagcattatcatggtaagaagacgaaaagagataggtacaggtatgagatatgtatgagagttttaacagaattacagtggtaagtgtgatg

SEQ ID NO: 49251 - DNA, 599 bp, Arabidopsis thaliana columbia
  unsure (1)..(599): unsure at all n locations
gatttgcatgttaacctgttgcttaggtttagtagaaacacaccaaacctattcacacttggcttgacttagtattctttgatcgtatcctgattgatagcaattacacccatttggattgacaccttacatgttgcaatgacataagatgcatttagggaattgacacaccgaaaacccttgtatcaatttggcgccgttgccatttgggtgtttttcttgttacatttagaatttctgagttattaagatcaagttctatttctttctttctggttactcacttgtttcttcatttgcttgtttttgttttgcaggtactcttactctactagcacgtcgagtataagcgtcgagtatcatcaaaactggattactcatttcaaatctggtcgtaatggccaatgaagcgaatgttcgtgagttgccatgcaacattggtactggagatgcaccaagaaacaccatcaaagagttggtattgcccacctcctgttgagaatgagaattttgagatcaagattggtctgatctccatgaatcaagnggacaagtttcatggacttccaatggaggatcattagatcacttgatagttt

SEQ ID NO: 49252 - DNA, 371 bp, Arabidopsis thaliana columbia
cctcaatattaatcattttatattttttcattttctttaagctgttgcactaaggttacttaagaagattcccagaatattgactcatttactctcaggtgcacttaaataatttacggcgagctcttccgaggaatgcttacaatagaagtggttgtggattcgaaccactgacagacggattttcagtccttcactcgaccagagctattacctgtcaccactttcttttcaactcgtaaaggtaaagaaaggatcctgcctcaactaactgatcgatcaaccttatttcttctcttatgagattcctgtttagtgatagttagaggtccgaataccgagagggaagaactcgactatttctctgattt

SEQ ID NO: 49253 - DNA, 443 bp, Arabidopsis thaliana columbia
taacataaaaatcaccacattacattatgtttactgcccaaataataacccacataaaatattacacacaaaataatctatctcacacaaaataataataaaacaaacactcgctaaatatgcccccctcagtgaatttgatcaaataccccaaaaataaaattaataacatgtgtggagtataaaacacgaaaaaataaaattacaaaagaaagaagataacatatctacagtaaagttacaagtatacagatgttagatcatcgtgtttttccaaatcctcgaatccttccgtcttgttactgtatagttaccctgcaacgtaataattaataatctcatataaaagtttagaaattttggatgtaattaacatcaaaaaccacaatcctaattactgataattttgtaccatttgagtgtattgagaatgcatttaggtg

SEQ ID NO: 49254 - DNA, 544 bp, Arabidopsis thaliana columbia
ttaaaatgtgaagaccatttattagtgcaacatcgatcgattgaactatagagaatgtgacatttccaacgaccaaactcataaaaaaaaaaaaaaaattcacaaatgcaaataagatcttaactaaaattcataaatagataataaaataattaagtcgagaaaaagttgcagtgcgtaaattttattcacggtcatactctcaaattttatttattttctgattataactctttgtttcttcggtcggggtttccgtcgatttggatgatgatgaggatttaaagactcatagttcttcaactgtaatatgttgtattagtggagaaaagaagctttagtctcacaccgacgataagagttctaccggcagtgtagtaatacatagtagaagacggagatctaagatgaaaataacagagacaagaatttgatcaagggaccgaagattcataagatttcatggaatctttgtcgataggggaggtagactccggttcggcgaactgagccaccatcgaaggtctattttttctccttagta

SEQ ID NO: 49255 - DNA, 733 bp, Arabidopsis thaliana
tatctcaaaaacggttcaatcaaaatcaaaactttatcactagagaagccaaattagggaacttacgcagaagatccaccattgtaagtaagagaagtgccattaacaaagagaagaagcgtagggaaacctttaatctcaagctccgatgcaatcttcgaatacctatcaccgtcaatcttagccatcaaaaccgaactcccaatctctttcaaagccgtcgcagcttccgcgaatctcggcataagctccgcacttctcgcacaccaaggcgcgtaccctaacaccatcacgaactcgtttccatcgatcactcgcttcgtgtaatcaccgttgagctctagtacgattctctgagctttgcttactgtttcggcttctgattgttgctcaggtcgatcttcttgtagttgctcgtctactgctagaagctggtctagatcggaatcgaatccgggttcgtttgattcgacattggaatcgggtgatgagtaagcgatgatgattgtgaaactgaggagtatgaggagaatgaaggtaaaggtagagacttttgatatgggttttggaattaacgacattttgattttgggttttgtttcgtccgagtttggacggtgattgatcggagaagagaagcaatcgtcgtcaaatgaaaaaagcctaaaatctcaccaggatttacggcgggacgaagaaagaagactcgcatgttttagcaaaaaacaacaaa

SEQ ID NO: 49256 - DNA, 750 bp, Arabidopsis thaliana
ttcattagaatgaagtgttgggtttacaaaagaagaacctaaagcttgtagactttgccaaagaatgtaaaaaacaaagattacaaaagaggagttgagtgtcaatcaacccattagcggatccaaagagccattaaatcccgaaaacgttttctggactttcttgcagtaatggtattcctcacttccctgtcaatgattttgaatatagttgctggtgggattgtgatgccattgtgaatcatgttattcctctgtctccaaatttgatagatagctgcttgggcagccactttccgaagcagagaaggagaagcgtctgcttttagacctgtccaagcaataagagcagtccaagtgtagaagatacacggagttagcctcagcctagcctggatggagttccaaatatgaatgctaaaggcgcatcgcaggaggagatgatccctattctcgacgtaatcgttacatatctattaattcgagctattaattccgacacgtcaatcgctgaagttgtttttttggtgagtgtcaattgctgaagttcttgttgtcgtttctgatattggcatttggatcaaatcttttatcaacttttcatgtcgttctatcctaaggtcagcaatttttttggctgactccttagctaagcaagtcttatcgttgtatgggtcaagtttctattgagtatatatatatctgatgttaagaaaacaaagaaaaaagtcagagagaatcacatatggt

SEQ ID NO: 49257 - DNA, 595 bp, Arabidopsis thaliana columbia
ctaataaacatggattttttttttaattttcttttaacaaaaactaatgttttctaatttgaccatagttgttaacctaattgacaattataaaaaaaaaagacagcaaataaataaagattataatttttaagaaaaaaaactaagagtaaagcataataaacgaccaaactatggggagggagggcatgaaattgccaaatattaatcattggattgggacgactctcgtcaagaacgtgcgacttagtgttacggcaccatttcattcctttttctcaaatcccttatcaaattaatatggtttaattttgtcaagagtgtctttgtctttgtttttatagttgtaattttaaagagttttcttcatctttacgacataagaatcgaaaaatcttacacgaacgtgctcaactctctttcaacctaccaatgagcatacgacacatcatgaattgcccacattagatttaccaaatcatacggtcgcattattacagtttgcttctaaaggaccaaggacacatcaaaatttcaccgattatatttatatgaactagtattcaatcataccaaactaaagaaggggttagag

SEQ ID NO: 49258 - DNA, 823 bp, Arabidopsis thaliana columbia
gcataaggaaagttcaataacacaattgcacgagaaactcaaaactcaggatccaaaaaaatttgagttcaggaaagaaaaagcctaatagagctacctcccaatcaacaatgcacacataatgaaaactgagagatgccagagaagtttagaattaattgaataaatgaacacataaaaaatccacattcactacactaaataaagttaagatcttgttttaactttctatgtaaaacagagcaactctaaacctagcccataacaacaacaaccgtaatgtggggagatccacaagcatatgatcattaccagtttaccactattatgcaacaaacttaagaatgcagacattttgtctaatcaataatcctactatgattgacatcttcaacaacaaagaggtttcttcttagcaagctctccactaaaacatgcacacgaaagactacactaaacactcaaatcaaatcaaactcggtaacaattcaattcaattcaatcaagagacctatcgaaaaaatgaaacacatttgtctttaagcatttttgtttgtgcatttcatttaccagacaactaagcatgtaaactttattctatcatcaagaaactaaacaatatagagaataataagcaatgagaagagagtgaagtaccatcaacgatccaaccacggcgtgaaactgagagcattgaattgagcaaagcggaacgagtggcagtgtggtaagggagcatcgtctccacgcaacagcttagttctaccggagatctttcattccaaacaaaattcgcaaaaccaaaacaatttcagaacggaga

SEQ ID NO: 49259 - DNA, 671 bp, Arabidopsis thaliana columbia
aatgacaaatgaacaaacaatccaaaccaaatacatgatgagagacaatattcctctgttcccaaggtaaatcatctgggaataacaagaaaaagacgagaaaaattgatagaaggatttgctcaaatagtatagaaatgcaacaatgatgtatgctaacaacaatctgatttctgttcaggcatagttcaacctgaatatatcgttgaacacgtaaaagcttccttgtggcgtcggcatcaaatgaaacatctgtagcacacaatgaaaccaaacgttttgtagttgtgttagaacaagatcaaagataccaaaaaaaacaaaaaaaagatcagagataacaaagcaaacaatacataacatcgacataaccagcttattcaatctcattcatggacaagaaatccatcaattgtggcgagggaaaacaattctcttcaatctaatcaacaaaactcagagccaaacttgttcttcgagactaaacagagactaatgcaaagtttttcatcaatgagctatacacgagtcacaacatcatcgatcattgtagctcaaaacgaatcagataacaagtcgcaacgaatttgcaattctacatccattaaagagtcagatttacagatccatcagctaatctaaaaccctagcgatctaataactaaactcac

SEQ ID NO: 49260 - DNA, 321 bp, Arabidopsis thaliana columbia
cattgttacattacacaaacgtttttgatgcaatcgtagacgctgcttattttgcaatgtcttatcttaacttcaccaacattccaatcgtggtcacagaatctggatggccatctaaaggaggcccttctgagcacgacgcaacggtagagaatgcaaacacttacaatagcaatttgatccagcatgtgatcaacaagactggaacgccaaaacacccgggaactgcagttactacatacatctacgagctttacaacgaggatacgaggccaggaccggtatctgagaagaactgggggctgttttatcaaacgggac

SEQ ID NO: 49261 - DNA, 364 bp, Arabidopsis thaliana columbia
taagtgaatttacgtaatactcatcatacagagtcaatctccgactctcagacggatgccttttcttcttggagaggttagcacatgtttcatgtagtacgaaatcacaaagcgtgcatatgtagcatgaattaaaaaagattggaaggacgcacccatagcattgcttgcttatatcatgaaggatatcatcctcattgacgagtcttagattgtgttcgtgagtaaaatgtttgatcagcccctcttctaccacatagaatggcaaaagatttgccgggtcttcttcaggcaccccttccaattctatcccatcgcaaacattactccttattgcacatcttgaatgaacaacgaaagtgca

SEQ ID NO: 49262 - DNA, 567 bp, Arabidopsis thaliana columbia
ggaatcataaaggaaatctcacctcattttggcaggattcaatctcatccaaggatttaccattacgaacagattcaattatcattataagtttgtccttttcaacctaaaatagatggaaaataagtgtaaagtgctagatgccataaaagtttgatccatcaaaaaagaatgagtagaagaaaaacctgagcatcataagcacgctttgagaaatgctcagacgcgactctccgttcttgaagttcattgtgtagctcacgattgcttgcctcaagtagtgatatcttatgcttgagaatctaacaggttttatagtagtttaagtataagaaaatgttactagaaaaactgtcactatttgtctcagatcagattgaatacctggagctcatcaaaagcaccactatcacccctatagaacaagagttctgtttgcagttgctcaatttggctccgcattctttgcatttgtgcggttgctgggtctcgattgatctaagtattagaagaaatgacaagaatgttaggcccaaatgatatctatagttgagaattcataattaa

SEQ ID NO: 49263 - DNA, 977 bp, Arabidopsis thaliana columbia
atcgtctccaccacattcgtaagggacaaactcttcctatatatcatgaatataagtctcacataaaaaggatcaaactcaaagttcctcaaactctctaacatgttgaattaagtaagctaaagacacagaatctaactaaagcaacctttatttgtatagaaacagagaagctgtctctttacatacaccgtgtcagtatttttgggtttcctgagtctttatgtagatatcttacctgttatgtgtctccaatgccaatgatgatgatagacgatcagtccagtgaaaagcaccaatgctggggaaaagattgcaaaatagttagctcaaattcttcctgtcagcttgctagatagtagtgtgcataaaaccctacaatgcatctgcgaaagttacattggactaggtcatctagccatatggcatcaatagtagcgccactcatgtaaaccttatctaacctatgatggactagtttcagcatttagagaataaacagttctggaatggtcctggaaggaatcttagcatccgtagatctaactgaatcagaaactagcagaattcaaagacaaacctgtcaatcataagcactccgacttgacttccacacgcctcctgttgttggatccggtaatgcaatgtctgcaacacagtgaaatactgatacaaacttttaaacagggtcctagattccaaacacaaatccaacaatgtgagatacatcaactcaaaacattaccttgagactggacaatagttcaagactatcatagcaacgaacatacagaaaccttttcatgcatgaagcatataactcctcatcaaacacagtctttgtcttctcttctgcagatttgcaactcttaacatttgactcctcaagttgccaccatgctccatttcctaaccctgatacgctaaaagaactaacatttgaacatctcaatatcgaagcctatgtatgattgaga

SEQ ID NO: 49264 - DNA, 610 bp, Arabidopsis thaliana columbia
  unsure (1)..(610): unsure at all n locations
cactttaggcccacgcccatttattttcacttttttgtctaaatatatatacatatgatataatattctctctctatttttttttccctttcaaattgtaattttcttgaaaccaaattgtattgttgactcttgttttattattttctacttaaataaaaaaacgttgtgattattgattaatctagtagatagattaaattattgtatcatctcaatctaaatcaaattagaacataatatttgccacacaagaacataaaaaaattgtacatttggtttggtttatttgaatttggttccatagtctcctaactaagaagaaaaaataaacacttttgagaaacggacgaacaagaatcaacatatcttgatacaagactaattaaaacacctaataaaaaatcacccaaaaaacaaaaaacaagaacaatgactagcttttctcttccttgttcacgaaattagtcgtagaagacgaagaagaagaattcttgaacatagagaagggaggaagttgcgacgatggttgatcaaagaagccccgtttgattactcgcataatgttagacacaataagctgctanaatagctccacatcctttgttat

SEQ ID NO: 49265 - DNA, 563 bp, Arabidopsis thaliana columbia
gttcccccgctccctacttcagagactggtttgttgcggagctaagcctgcgagttttcccttggaacaaaatcataagctcggattgtcaacgtcaccactgctcacggatccacaacggtatagacgattggttggtcgcttgatttatctagctgttacacgacccgacttggcattttcggtacatatattggcacggtttatgcaagaaccaagagaggatcactggcaggcatcattacgtgtcgttcgctatctcaaagctgatccgggtcaaggagtttttcttcgacggtcaggtgattttcaaatcactggttggtgtgactcggattgggctggtgatccaatgagtaggcgctcagtaactggttattttgtacagtttggtgactctcctatctcttggaaaacgaataagcaagacacagttagtaaatcatctgcggaacgtgcatattgagcaatgtcgtttctcggttcagaattgttgtggttgaacagctgctgcttgcacttggggttcgtcacgtcaaccgatgataatgtgctgcgacagt

SEQ ID NO: 49266 - DNA, 610 bp, Arabidopsis thaliana columbia
  unsure (1)..(610): unsure at all n locations
atttcattggaacgaacatgaacacgatcataaccaatcagctgcttctccggaacaccagataaaaccggtggcattttcgaaaacagcatcacaacatgactaccgtcgatttctccggtattgctcacatgaacacgaacgttaaaccgcagagattcgcaagagttaacaatcacatcatcgagctgtaagtatcgaagttcttctccatgttgtagttgtttcttgtgagaagactgttgtggaagaagttccgataagctaagtctgattggtgctgataagatcttgtactcgaatttcgtgtagcttaaaccggtcccaaaactgtaaacttgaggtccggtatagaatctgtacgttcttcctggatatccacgagatgaattggctctcatgtgcatatccgacattgccacatccgtgaatgactccggataccacgttgtcggtaatctaccacctacacttgaaccgaaaccaaaaccatatacaaccaaaaagctttagtattcagtttctgcatttcataaactgggatgaacagaagatgctttgatttgcgataggctaacctggattgaagcnccaaatatgattcagcgag

SEQ ID NO: 49267 - DNA, 581 bp, Arabidopsis thaliana columbia
gaggatcacgatcccctcaagcagagagcagatctttgaaacagagtattagaagattagttacctcttgttcaaagaaaccggacaggtcaagaaaggaagacattccgattaactgaaacgcattgatgatggtcggtgaatcactgcccttcccttcttctgatccctagaccattcaaaagagagacagagaaatgaggacattgtacttgactcaaatgcagttgcgatagagagtaagggtggcagattcttacgagttcttggattgagaaagcatcatcgtctgtgtcaacttcttcttcgtcatcatcatcgggaattgaaggaatgtactcaagtttgaaccactcgctggctttaatacccacaactgtgatcctcgtgactggatttggatcaagcattctcttaatcatggttcttgcacctggggataaccatcttggtattggtgggtctctttacatatctagaaatcaaatcaattatcaagcttatttcttcaaaatgtgtattgaattggcatatatatcagaagcaatgaggtttacattctggtaaagaactgcaaggtt

SEQ ID NO: 49268 - DNA, 506 bp, Arabidopsis thaliana columbia
catctaatgatactaccctccaatatatcagtcatttgtataatctctacaaagcatgcgccctttcataaagaaacaatcaagattcaagaatacaaaatttatgttgagctcaagatccaggaattgacattcaatatgcataatacaaaagttttacttaacaagtacgaaacttattactaaggtttttatttttaagcttataagacataaagaagagctcatagttttaatatctccatgttagcctaacttataagacataaagagcatgacctccaagtctaaccacttggagaaattgagaaacaagtaaacaaattaggattataggcatggccaaagaaaagacaacaaggaaaatgttattgagattctttaacctcttcatgttcgattgtctatgcgagaggaagaacacttgttcaatcacacactattcagcaaatctttctccttggttttcattgtcaatgcattacgggtgaagtttccatcagaag

SEQ ID NO: 49269 - DNA, 491 bp, Arabidopsis thaliana columbia
tagtgcatatatttagaagttgaaaactttctaagcatttcaactatttttaacaaaagtgtagacagcactataatagtttaaaaatacaaataacaattgtttggtataaaacaaacaattgatgagttatataaatgattatcttcaatattatatagcttaagtagttaagttaatatatataatttaagatggattaaaaaaacaattttgtcaaatttctaaattatattaatatagtacaaacataaccttagcacatgtgaatggtagagcatttctgaaggcatctccatcggtggtatctctcattgtttctcataattaaaataataaaaaaatagaaaagaaaggagaaagagagagaaacgtttctctgcccagaaaccttgaggtactctgacacacttattttgccacatgtattaattgtattggtgtaatctaattaattaatttaaatttatttgaatgataaaataataata

SEQ ID NO: 49270 - DNA, 721 bp, Arabidopsis thaliana columbia
taaacctcaacaggagaaaaggtgaagaagatatacctcaagagattcaacaagatctttgaacaaatttcgttgggtgttgagatctttcttagcagaacctttaccacctgcctctacagagagctctctaacttgtttagtgactttagctttcaagccatgcatgtgcatcaatgcttcctgagagacacctccttctttcactgatccattagcagaccctttgacttcggcagcgaacttctctagagttcccaactcatatattactgcaagcgcttcaccagcagctatacgtacagatcggtcatccttttccaacaatgtagagagataagttacagtcctgcaatgacattaatattcaatcagtctatgaataagtaaaattagatcgaagaaaagcatgatgccccacttactcttgaaaaattttaggacctagagtccaccgatcaactgttgtgagcagaaaagcccaggaagatacaacagcacttattacagcaggtgaaggtttagttgccacaacctacaaaaaaaacgccaaccttcatgtgagcctactttcttaataaatcagattgaaaaggcttgtaaaatgagaaaaaagtaagatgcatacattagaccctagtttggggtggatcatttgccagataatctgcatagatttctcggtttgctctggatcattcccgccaacgaaggttatgac

SEQ ID NO: 49271 - DNA, 717 bp, Arabidopsis thaliana
atgatgcagaaactaaactcaaagagctgaacaagatcacaattacctattggtttcacttgtggggttatgaccagaggagtattatcattaataacatcattagccctcttacttctcaattctccagtggcctatttgcaggaaacaaaatttgttaattcaaagacatgagaaaagcaaacgaaattagtgaatgcctaactcacagctctactttcagcttttgtgagtgtctctgcacttttctcaagattcagtgatcttctggcatgttttgtggtccttttaggagtcattgacttagcaccagaacaagagcgcattggcttcgttttcatgacgttggaaggagtttctatcacaggggtttgctgaaaaaaggacaaaacacacaacagcttcaattcatcataccaacaaatcaaaaaccgaaagaaaattgattgaaattattgaatatgatacctttggtccgtcctgccaaaccccatcttcccacactttacaaggcctaagatctgagtgtttaaccactggttcctcctttgtaacactaaacaaaccatgtaacagttgtgatcgagaactcctcttaccaaaccttgacgccataccgaaccacgaaacacctccacacgatccatcaattcgtacttttcaactggaaaaggaggcggtgtgggtctacacgggacgaatcaatggtactgttgg

SEQ ID NO: 49272 - DNA, 335 bp, Arabidopsis thaliana columbia
ctagttatataatggcttgactcaatcttctctagatctctcggttgctgcaactattccgtgcatatgaggcagaccctagtgttaaacttgtcatcctaaagggtcaaggaagagccttttgtgccggtgggacgttccacctgttgttcaaaacatggtacaaggtatatcaatatatcacccttccatgaccatctttcccccctcctttttgcttattttctgcttttacacactctttatctatctcacgtggactaggtaaatcgagacttggcggcgatttcttcagagatcaatacacgcttaattatgttatggccacgtatagc

SEQ ID NO: 49273 - DNA, 573 bp, Arabidopsis thaliana
acacagctcgtctgtatcgaaagcctcacacccactcttacaagccaccacgtgtccactgtgtgaccggacctgaagatgagccggacacgtttttattagatcttcacgacaaccaacgacaggacagacaccatggccttcgtgaggagtcacggtcatcggaacattgtaaccgtcaacgagagagacaccgtaagaggagaagtcgtggtgaccaccgtggtggaggtcgaactgagctagagaagctggtggtgccccgccgagaccgttgcattccaggcggtttccgcagtctccggtgaggcaggagaattttccgttgtagtgggcacaccaggttctggcccagatgcgaccggaccagtgtgtggttggaacgttgaaggagcggtgagtgaaagttgggagagcgaagccacctttctctaggacggggtggccggcgttgggttgaatggctggccagacagtgaagggacagttgttgacgacggtgaggaagagacgggaagtgtctacggcggaggagaaggagatgaggaggaggaaggaggcggcgagaggaag

SEQ ID NO: 49274 - DNA, 905 bp, Arabidopsis thaliana
agatcgatataattattttttattgaacaaagctaagatcgatacaattataaaccatatacttacgttaaaaaaagaagaagagatctatctattcagttccttcactcaatttaaaaacaaatgtgcatgtgtattgaatatatataatacacacaacaaacaacatagtttcacaattcgtccctgcaaaatttgttcacaccctaaaatattggaagctgccatcatcaacatgtcgcaagtcctctactctctaacgatcgtctttgttttcttcgcttcgacaaacatccagaaaacatcaggcagtgcatcatcctactcccaaaaccacaaaacgttcgtgaaaacggcttgcaattcgacaacataccccgacaaatgctacaagtccttatcctcctactcatcgaatatcaaatccgacccgatcaaactatgcaccaccgcgcttaacctcaacgtgaaatccgcaaaggaagcaacgtccgttgtctctaagcttctcaaaatgtctcagaaatcaaccgccggacgaaagggtaaaatgttaccagaggctcttatactcaaggactgtctcgaggagatgaaggacacaattattgagctcaagcaagcgatcacggagatgaagaatctacaagatggtggctctatggctgagcatataacgaacgttaggacgtgggtgagctcggcgttgaccgacgaagggacttgtacggacgggttcgaggaggtgaaagtgaataaagaaacaaagaagaaggtaaataaggttgttgaggaacttgcaacgacgactagtaatactttggcgcttattacgaatctacgttactagcttacgaataataaaaataacagtgaagaaagttattattgatgaattatactac

SEQ ID NO: 49275 - DNA, 531 bp, Arabidopsis thaliana
tgcaaaagtggtattttcaggtttggtttcttcactcctgttaattccactactcggttacgttatgttgggatttggtacgaaaagattccaatccaaactgtggtttgggttgctaacaaagactctcccatcaacgacacttccggtgttatctcgatctatcaagatggaaatctcgcggttaccgatggtcgaaatcgccttgtatggtcgacgaatgtctcagtaccagtagctccaaatgctacttgggttcagcttatggattctgggaatcttatgttacaagacaacagaaacaatggtgagattctttggaagagtttcaagcatccttatgattctttcatgccaagaatgactcttggcaccgacggtagaactggaggtaacctaaagcttacttcttggacaagccacgatgatccttcaacaggaaactacacagctggtattgctcctttcacgtttcctgagcttcttatctggaagaacaatgtcccaacgtggcgtagcggactgtggaac

SEQ ID NO: 49276 - DNA, 450 bp, Arabidopsis thaliana columbia
gttcataattctcaatactttaaccgccgatgtttcgttacggcaatctttggattggcaatagtattgatcgacgattatgcaattgagaacgttctccatttggatgttttcgaagaggagatttgatactgatccggtaccgccttgccatgttttgactcggaggccgttatcggaatcgcgaatcacggcgtttctcactgttatgtttgaaacgcaggcttgtgaattgtgcacgcctaagctcccaatgctgcgtttttagacattttaagaggtttttagcggttagaattcaaatcgcgttttgaaagcgatatacgactaaacaaaatgtacgagaaaaatatagttttcttaaaataaaataaaaactcagctaaaagaacttcaattttcaattttatacctaaatcatacgcgtaattagcttttgagaaaaataca

SEQ ID NO: 49277 - DNA, 472 bp, Arabidopsis thaliana columbia
atttcagtatatggattttgagatgcatcacacaagatttggtaacatccaccgcatgacttgccgtcgttgatcatgaccgtgcttaacgccgcggtgtttgtcttgtagccgtctgtgtataggtttccataaccacaagctccacctgaagaagaaagctatgagaaggtttcttgttgatgaaggaacattacagtgtaaagctctcattagggtaaaaccaaatgttcatgtctagtttatgagacttacccattgtaccagaggcatcacttccgccataaaaggtcgcatgagcttgcaacctaccagcagaaactgagctgatcttcatgaagaacattgtggagaagatcattgcgaccaatagagagaaaatcttcgtcattttgtcttctatcaatgtcataggtgtttaaagttttgattagagaagaagttgaagattgttggatgcataagacttagg

SEQ ID NO: 49278 - DNA, 499 bp, Arabidopsis thaliana columbia
cacatcaagtaactgctctgccatttctcgatcttcaggacatgatggatccattttctccatagcctctttgacatctctgactaagacatccagcttcttatccacagtctctttagcaacatcaaatcttgagtgaagtgagcccagaagttcctgaaaatcattgcaattcaaaaaatagaaccaaataacataattagaccccaacaaaatgagtcactggactagctatatcatatatggcatagagagtttaattgaattccttcaattttagaaaacagaactcaaccctgagaagtttcatcaatttgtatagcaatatcttccgacaattttcaaactcaattaaagaaaattctaaaactcaagattgttgtagtccttcagatcgttatagctgtgcggacgagggtagggagtttgaacacaccccttggtccgaattcatgggaaaagctctttatacccattgactttgaacagggagggttag

SEQ ID NO: 49279 - DNA, 566 bp, Arabidopsis thaliana columbia
ttaaaaattataaaaatagatcacgcgtattagtcatcgtaatctataaaagtaaaaataaagatgggatggaaatgctctacataatacattaaaaaaatatagcaatttaatcgatgaaaacctcccaaaaaaaacataagttttaataaaaaaatgcctcaaatagttttttgccttaaggtattgaatattgttgggccggggctggctggatgcagtgtatatatatgattggaaaaaatcggttttgtttatactactaagtctttttaaaagttttaataagatagtcgataaaaaatgtcaatgggtttggtaggaatggggtcatcctctgctcatctctctttatctttttagtacatttaatgatattaacccatcaaatgcagtggacgtggaggaatggtgcccactccacataatttatatgatggtcccccgtggttctacttacattagcactcaatataataacaaatcatcattaagattttacactgtttcttataaaactaattatgtttgtatgtaccctttgttgaaagttcacaattatacac

SEQ ID NO: 49280 - DNA, 541 bp, Arabidopsis thaliana columbia
gattttactacttttcattagctttcacgaatctattttgacaagagaaatcattagaggtaaacatgctttttggtcaagggccttaacagttccaccaatcaagctcaaaagttgtacttaaccgacatcttctgtgaaaacatataattacatgtacaaatcaaaactaccttatgaaataaatagaaatattgcagttcatttctaatttaacctcttcaacttttaaaactatttacatttctttatgtcatttctagtcattttgatgcaaattgtaccatttatggattatcttcacaaatttttaagttggtgaaaactttttggtgggtagttaaaacttgaaatagaaatttactttaccaaaataaactaatgaaaagtaatcactccactccctataataagatttccaacgttcccactaagcaaatcataaacccaccgagacgatgtctctcatcatcgtcttcttcttcttctcactcttgctcacatccaatggacagttcttcgacgagagcaagaactatga

SEQ ID NO: 49281 - DNA, 467 bp, Arabidopsis thaliana
ttgttgagttaatttccttttgatgaagtcgtgctgataacacagagctccattttcgctctctcttcttgcttatactgaacagagctaatgaatgaagcgccacttcttcttgcttctactttcagataaacagagttatctccttaaaacgctgcgtttcgactaatcaacaaatctctctttaaaacgctacgtttcaactaattaacaattatctcactaaaacgccgcgttttgaagccatatcacataaatacgccgcgtttgtggctatatcacatcaaaacgcagcgttttctagctgatagataaagcaactattttcccggctagtgagaagagagagaagagaatggaaggtgtaggatcgagattgagccggacgtcatcgagatacagtggtccggcggcgacggcggtgttcagtggccgtgtaaggaaatggaagaagaagtgggtacgtg

SEQ ID NO: 49282 - DNA, 1501 bp, Arabidopsis thaliana
tttacattttttaagttgtacatggtatttttactattttgaggatagtaatgataaaggtcagttataaaatttgtgaggacttatttggaaacgaaacgttttgaaacaaaaaaacaatagttctaaaacatacattaaaatgacctagaggaaatatttgtaacctatatgaatcgaatcaaataaataaaataacaaaatttagccaagaatggaccccacatgcgtcaataaataacgaccccttgcgagggttaaggcaacacaacaacacaagcttttttccaagtattgaaaacaatttcaaaactcaatattctctcttcatagtgtcgacatggcttgcgaaaacaacctcgttgtgaagcaaatcatggacttatacaaccaaatctcaaacctcgagagcttaaaaccatccaagaatgtcgacactttgttcagacaacttgtgtccacgtgcttaccaacggacacgaacatcgatgtcacagagatacacgatgaaaaagtcaaagacatgagagctaatctcatcaagctttgtggtgaagccgaagttatttagagcaacacttctccacaattttgggatctttacaagaagaccaaaacccacttgaccatttacacatctttccttactactccaactacctcaagctaggcaagctccagttcgatctcctgagccaacactcaagccatgtccccaccaagattgccttcgtgggttcgggtccgatgcctctcacatccatcgtattggccaagtttcacctccccaacacgacgttccacaactttgacatcgactcacacgcaaacacactcgcttcaaacctcgtctctcgcgacccggacctctcaaaacgcatgatcttccacacaacggacgtactaaacgcaaccgaaggccttgaccaatatgacgtcgttttcttagcggcgcttgtagggatggacaaagagtcaaaggtcaaagccatcgagcacttggagaaacacatggctcctggagctgttcttatgctaaggagtgctcatgctctcagagctttcttatatccaatcgttgactcgtctgatctcaaaggctttcaactcttgaccatctatcatccaaccgatgacgtggttaactcggttgtgatcgcacgtaagctcggtggtccgaccacgcccggggttaatggtactcgtggatgcatgtttatgccttgtaactgctccaagattcacgcgatcatgaacaaccgtggtaagaagaatatgatcgaggagtttagtgccatcgagtaaacaaacaattaataaaacacatctcttttcttaagattgtgttaatgtttttgtcttatattaactgctcttttcatttcatgtcttgtgtgtgtgtggtacgcttattaagtgttaagtttgtgaattttgagttctttgatctttgttatgaatgaaaaagataccgaacattttgtttgttgtactttttata

SEQ ID NO: 49283 - DNA, 473 bp, Arabidopsis thaliana columbia
aagaagctatacctaatgtactcttcattcaccttcagggtatttcttgcatagatcgacttactttaccgtcaatacacttcgaatacgtctgatagagcttctctgtgcttgtgactctacaacaggattcaatgacaccttcaagttttgtgaatgcggggccgttgtcaagtatgtagtcagccctgtcaaaggcgatgtgtatgcaacccttggtatggtggattcgcgtcggttttaaacctaggcagtattcgatcaagttatgtgcatgtacatactcagaccaccggcgatacatgaaactcgtgtcgagcactttatgacatggtattgtcttggcactcttgtcgggcacttcctgacctggtattttgctggtactcttgtcgagaacttcatgagacttctctgtcttcaactccctcaccctggagaatcctgttaagaatccttttaagaaatggtgt

SEQ ID NO: 49284 - DNA, 523 bp, Arabidopsis thaliana
taaaacacaagtttgaacaaacactaaccactttcattacattgcttgagttttaaatgaagcttaccttagtttggtctgagtctgttaggttcatgtctagctcaacagctttaggtaatggagattcagtgtcgaattcttcagtctcttcaatttcagaatcccttagaaatcactttttctctatgctcaagcatcgcaatctacacaaaatcaatcattttccactaatcccacacaactaaaaccctaatttaatgatttggggaaaaaaaacttactggagcgtatctgaatcttcgcttaggcgactcctctgtctcaccggaaccattagcgtcggaggcagtaaccgtcgctgaggtaagtggagtccacttatggagaagtagatggtgtggtgagttactgttgttgctgttgttacgaccgttggatttagatgctctgaaaacaccgacggatgaggttgagacacgtacccacttcttcttccatttccttacacggccactgaaca

SEQ ID NO: 49285 - DNA, 447 bp, Arabidopsis thaliana columbia
tcgaatgggtaaaattgttgttttttttttcactatggtgttcccttaacctaactttcactttttgtattatctttctctttcactcactttaaagtctatttagagattcaaaaacaaaatcttccagaaactgcttctgatcttagaagatgactcacttctcctaaaaagcaccaatttcaatcctatttttttctcttgttttccggcaagatttggtaaaattttgtgttctgatttgttgttttgaatatcaactatggaacaacggaagaaaggttgtaagatcaggaagagaggtggttcttcctcttcttcttcttcacttgctcgtcgaaaccgcttcaaacgtgcaattttcgccgggaaaagagccgctcaagacgacggtggctcaggaactcctgttaagtccatcaccgccgctaaaactccagttctgtt

SEQ ID NO: 49286 - DNA, 521 bp, Arabidopsis thaliana
cgctcgctaccttagtcggactcaacgtcgctgctgtggctgacccgaactcacgcgccccattcttaactctctcccacgcgttcttagacttatgagtagccgtttccttcaattcttgtgccttctccctcactctatcttttgccctctctttcgattcatgggctttttgggctaccgtctccttcacatcatgagctttctctcttaccttctctttagcatcatgggctttctgagccacactctctttagcatcatgggctttatcagccacactctctttcgcatcatgggctttatgggctacaccctctttcggatcatgggccttttctgttaccctacccttagcatactgggcttgatcagcctacgtgtcttccacgtcacgtgccgcatgtgtaaccgtttccttcacatcgtgagccttatgagcggcggcttctctgacatcagaagctgtctcgccgacggaatcaacggtgcggtctttagcctgcctaccacactcgcga

SEQ ID NO: 49287 - DNA, 332 bp, Arabidopsis thaliana columbia
atcgtctgcgtcgaatagtctaagatttttccagatttgatgcctggttcttcaagcaattgcgctcaattcttatggtctactgattgtattgtgtgaatgtttatgacaatattgtattgaatgttgcagaaacttgcggctatttacaattgcaggagtgtgaatgaattaaaaggtctccatacgtgttccataggcttacacacatgtattgatcagcaacatcttgtgttcatgtactagatattgcaggtagtaatggattcatagaacaccatctgacctccgagtatcatcattccgctttgcacgaagtcctggaggtgatt

SEQ ID NO: 49288 - DNA, 501 bp, Arabidopsis thaliana columbia
gacatcataaagctgtctcgccgacggaatcaacagtgcggtctttagcccgacctaccacactcgcgatcttctgcctgcacttgccgagcgcatcgcatatgacttccccagccgtcgcgtggtgatcattgcctcgtctgtcatcaccggctgggagattccttggccgacgtgtggaagatacgacgccgtttctttagctttctctttaacatttctaaacatagaagttcccatctctacttcattctctttttcttctccttgatctgccgatggtggcgagatcgagactctggtattggttttccgtcgcgatcgtactcaaccaccacaacgtggtgtgccgtctttgacgatgacttctccctctgacgccaccgccgtgttgtgggtggtcatggctggactcggagaccatacctccgccgctagtaaagtgctcaagacaagacacaaggccaaaagattcgtcattacttacttatcgggtgttgt

SEQ ID NO: 49289 - DNA, 438 bp, Arabidopsis thaliana columbia
ggtaaacgggtaccgagctctcttaaataaaagaaacaacaaatcactaattaacacgtgaacgctcccgtgttagtcataagtaaatgaaaccaaagtaggagtcaggataaaagaatcaccttgtctctctttttaatgtacatgtccttccccgttttcgaaagaacaccttctgtcacgagctgatccatgatttctgaaagtcagattgtgaccagttagtataggaagacagactctgaagtgaacaacagatagctattatcaaacggttttagtgatcttcgtacgatgatgcttcaagcgtgtttttgcctagttatcatcatcaagcttgatttaccttcagatagaacatgaaatcataaggaagagtggcttagagttaagaaatggcggaaactatacatgcaagagctcagttacactttctaa

SEQ ID NO: 49290 - DNA, 572 bp, Arabidopsis thaliana columbia
gccctcctctctctcttactccttttttgttttaaatcaagaaaaagactccatgtcgagcatgtccatgtcgtcctcctcagctccagcttttccaccggaccacttctcatctacggaccagctctgttacgtccattgcagcttctgcgacactgtccttgctgtaaattttggattattcttatatctcatctcaatatttcaaatttataactctagctagggtttcacatgaattactagttaattaatgtgtgatattaattggcaggtgagtgttcctccgagtagtttgttcaagacggtgacggtcagatgcggccactgttcgaaccttttgtcggtgaccgtgagcatgagagctcttcttcttccatccgtttccaaccttggccattcctttttacctccccctcctcctcctcctcctccaaatcttttggtacatcggtttcattcatcgaaacaaattagggttctttcataaaaaaaacagagagtactaattagggcttttcttctcgagatacgcaagattgtgaactcagtccacaaatgtttaattttgt

SEQ ID NO: 49291 - DNA, 491 bp, Arabidopsis thaliana columbia
gttagatgtggcaaataagtgagtgagtggtgatttaaaaaaaaaagaaaataaagaagtaataagaattttagataactaacctctgttatatcaaactttgatgggaggacgctggagtccccaaggtagagctgtcctaattcaccagtgggagaagtccggttaagttcctaaagaaatataaaattatcgagaaaagtagttaaaacagtagatactcctgaattaaagagtgaagagaaaaacagaaatatgaggggttaaggtcatagttacctggcaaatgtcagccgtgtcgcgagccggagtaaaagagatacggtcggaattgtgaagctacataagaaggagttaaaactggatattttgtttgttatcggataaatatgttaactgaagaaaatgtacaagtgtaagttacactaacataacaaaacaagtaagcaaaatgttatcgaacaaagttacaatctaacttgctgatgatc

SEQ ID NO: 49292 - DNA, 293 bp, Arabidopsis thaliana columbia
atgcaagatatgaacgttttcagtacctcttgttaggttgtcactttggctgaccttttcttggacctaacataccaatttgagtttcttgatttcttatgttcatgagcagaaaaatcatctatctggcctgcaaagggaatatctcaaagtatcatttgacactgtggaacaattggtggaggtatgtagggatctgttgcatattcgcgaaggaaacctcggaaaatctaattgagtgtgtgctgtcagcgccatcttggctggaaaacggtaaggcaatgtatgtttgt

SEQ ID NO: 49293 - DNA, 519 bp, Arabidopsis thaliana columbia
cgatatttttctttctaacttctaagttccaagataattgaaagctaacctttatgattccaggaagattgaattcatttgacgaccaaccgcgagagaaactcttgtcctttttcaaaccgcgtgtataaggacttagataaatcccttgtcaaaacaacaatttggtccatgaacccaaaaaagggaaggcagcaattagcatcctcaagagcaatggcttctccttaactctccaccgccgagtagcctttctttcaaactgttgttttggacgaacattctcgtttaatggattgtcatttctaatctcacactagcgtatctagatcatcccatcctccatagccagtacccatgctgttagaatcatcatctcctactatccatgacttgtatcctcccttatctacaccacccctcatgtttcctccttgcctagctttccttgttctccactacttacactcgcagatctcgaaaatgtatctcttctacttcttttcatagacctaatgc

SEQ ID NO: 49294 - DNA, 920 bp, Arabidopsis thaliana
tccccttcgatctcgcgaaatcccatctgtctcacccaagccactccctaaagaatccgacactgagccgtcgactcccgctcgtacactagagcccgaacttcaccgctcgccggatgagaccgctcctgaattgggtcttgttgatgaacccactcacactacccggagacgtatcttcgtcttgcacaccaatttgacggcgatgattgtgtcactgagaaagaggttagtgtggatgaaaagtttttgagtttgcgttcagggaagagagttgctaagagaggtgtcgattatggaattgaaattgagtctagcaagtttgatttcgatttaaagttaggagaaagtgcgagtaaaacaaagagggtttgtgtggatttggttgaagaaactattgtgaagaatgaatcagaggatagtgtggatttggaagataagagtagtagtggtgtgttaggtgactcgttagcggagaagtggtatgtagtagaagtagagaatgagagcaataacaaaggaaaggggataatggaagattcctatggagaaagtgatgtgatttgtggtcagagttatgagaagcagagtagttctatgggtagaagaagatatactagggaggagaagggaaagggtattatgcaggtggaggatgtttcttctccggtaacggttgagattgtcgaagttgatgaagaagaaatggaaatcgagagcttggttaacagtgagaagcccccggatgtctctgtaacagaattggctgcgacgatggctaatgttgagcaagcgcagaatcgagaaaatagtaatgagattggaaacgattcaagaactcagcactttcgtgacattgcagagaggattgctcacagatttgctcattttgatgctcaagtggaggaagcagaggattt

SEQ ID NO: 49295 - DNA, 364 bp, Arabidopsis thaliana columbia
gtagtttgatttctcaagcaatattgtgatattcaaatttgacaatttcaggatgacatttctggtagcagaagctcgtgtaatagcaggagcgaccaagaacgcatactacacaaagtacttaagttcgcaaaccttttcgtgtgcatcaatgcgtaaaggaatttatcacatgcaggtgcagtcgctatagttgctactatggttcttaatgtctactagtacatgtgttttaccaagtccgtctcatcgcagtctgctcacacagccatccgctctagttcccatattggtatggcgggctatgcataaatgtcaataagatgacatggttagtcatttgcgttgtagacgtaagacaggg

SEQ ID NO: 49296 - DNA, 516 bp, Arabidopsis thaliana columbia
tgtttttaattgctgaatccagtaaatcagctctactagggggatctgagaaaaactcttcgtcaaccggagtgtccattcctgcttttctaagaaaattggctctctggatggccatcagcccattatctacaacatcttcgaaaggagctgggggaggatgcagtccccagtatctgtttcttggaacctgaaaccaagcaaaaattttagttaagcagagtgcagctggacaaggcttaagacatcataaagttcgggttcgctacaagtcaggcaatgccttgagtaaggaaaataatgaactgtggttgataatcagtcaatttttagaaacaaattagagtatataattaaaaaccagctgacaggaaaaaaaattataccaccaaagaccagcgattaggatccgcatgataaaaggaaaaacttcagaaggttccattttttctgacttcaaaaattgattcacagcttcctcaaagcgcaaatcaaaaagcagtagatccctatttg

SEQ ID NO: 49297 - DNA, 402 bp, Arabidopsis thaliana columbia
agaggctcaccgattcccggcattaccgcctaccacactctgcctccccctttcaatatgatccccttcatatgcttatctgtcattctacttccccttgcttcaggacatgaaagaagatacctccaccttacagggtgatactacacaatgacaagttaaataagacggcatacgtggttcacgtgttgatgaaggtaatacccggcatgcttgtagacacagcggttcacactatgacagacgtgcatatcactcgtttgccagttgtgaatgtctgaccttaggatgctgaagagcagtatgtatgcagctgtcgggtacagcaattataagttatgttcaacttgatggtggaggctggtgaaagtgcttaacgtaagtatagattttcggatgtta

SEQ ID NO: 49298 - DNA, 1399 bp, Arabidopsis thaliana
tgatctgcgaccggttcaatccaatgaccgaaaaagtaatctgattcacttccttcgtcggttaaagaaacagtctaacaccaagagagaccttaaatggttcatttccattgaggccatctgactgagtctgtcgaagtcttgtttgaatctgtgggacggctcgagccattggctgaatcatgccatatcaactccatctattcacacacacacacacacacacattgtgaatgttcatcaacagactaacaaaagcatcaagtacatgctgaacaaacaaaaggttcagagaaactcaaacaaacctctcctacgatgacggtatcgccttctttaacgcccatattcttcagtgatttattcacaccacaagcatcaagtacatgctgaaaccttttgtctgaatccatgtacctatccaaacacaaatcacatcgacattggttagtgacacttgattagttagattgcatgaattatggctgtagttcaactcatacctccagttagtcatctggacaaaacgttgaagcccggctccaactacatgccaagccctagtaccgctatcgcggaagacctcaaactcattaatggctgctcgtcgttccttatcaatcttcttagctacatggtccagattctcatttgcttgatcgaacaatgctatagcaaatttgaaaacaaaccccatcaatacactgcataagcgcgatatcattctattatgccaaagtaaaagtaaaccacacctttgggttctgcattggctgctctgtacttcttcaggagttcataaacggacgagattacttcatgtgtaccttctctttgtactgcgctcatacaaaaaggttcaatcccacgggcacggagagtttcttgaaacattggccacttcttgtaagcatctgggaggtccattttgttgtatgccactacgtaaggcttctcggcgatctcaggactgaatagttcgagttcgagacgaacagcttcaaactcaagttcaggttgtggagctgaaccatccacaacatgtacctttaaaccacaaaagaaagggtcttcttagaaaaaagcaaaaatgaagtataaagatttgaatctaaattctaaagacagttgttttaccagtgctgaacatctctcagtgtgccgaagaaactcatggcctaaaccgaagcctctgtgcgctccttcgagcaaaccaggaagatctgcgaccaccattgttgaatcgtaatcaaatgaaaccacacctagattgggaagtaatgtggtgaatgggtaatttgctatggttggctgtgcggcacttatcacgctcaacaatgtgctttttcctgcatttggagcacccacaaaacctactctgcgaccagtttcagttcta

SEQ ID NO: 49299 - DNA, 551 bp, Arabidopsis thaliana columbia
gaatcgttgtcactttctgactcatcagagatctcttcaacatgaacgactgctcgcgtctctttgcagctaccgcgaccatagatacttacttcataacttttgtacccatcaaaaacaaacgtcaagaactctccatcttttagctcgttatcggccacgaaattttcccagcctcgtgccaaatacacttgctctcgcttgctcatcattgctactttccaaactcttccaccagttcccgtgagaatcgctgttttgggtaaacgacgcggtaaatgttcgtagtaagaccttggtatcagcttctcaacacaagaaaatgtaacacaagttaaaactgtagaaatgaatgagaagcaaaacaacataaacgagagactctttctgcaacagaggctttttacacatgagacaataaggagagtgatggttatatgtctcactagacaaacaaaactatgttccaatagcatactcataaataagtcaaaatccacaaagatgggttatgttaccattttttcatctaggatttgtaacactactac

SEQ ID NO: 49300 - DNA, 404 bp, Arabidopsis thaliana columbia
agaggatcgacaaaaattccatttaatcttccgtactatataattcactctcactagctcttgtttcttacaaaacttattgtttagtacttagtggtcgtgaatcttgttatgatgattaatgcaattcgtacaatggacatgcatggtggttataagacttaccagtggaagaagatagtggcccttgggaagtagggacattagatggagtaggagcctcgacattggatgggtaaattaggtaagatgaagcagaaggtaaacgttgttgttgttgttgctgctgctgctgatgatggtgatattgataatgttgttgatgatgaagatatggtctagggcttggagcttggaggtagtaataaggggaaggcatgatgttcgatgatgatggtgatgtt

SEQ ID NO: 49301 - DNA, 297 bp, Arabidopsis thaliana columbia
tggagaaaatcaaaattaacatgctgagctaaagctgacgtggacatgcagtcagtacaaaagctattagcaggtaccaaaagtgaggatgacttccatgatgtattaataacaaacttcacataccttgttttgcatatcctcccggatggacctcgaaccgtggcctcatcagctgcatgatcacagaatagactactgatggatgtagcttgaggcagacgcatataaccaagtgttgatggctgaagttatgagtcactgtgcatagagatggcttcccaattgtatgtcgcc

SEQ ID NO: 49302 - DNA, 575 bp, Arabidopsis thaliana columbia
gcagtgcaggtcagactcatcccctccaatgatatcgtgctctaaaggggtaatttgcaatttattaatgcccaggcggcgcgggtcttgcgcttgacgcgacggcaagtcagggacgggcaatcactgaactcttaacgttacccgccgtattgcaacaagcaataaaacaggcacatccgctcaaacacgtagaagcaacctttgaaagccagcaccagtttattgatgcggtgataacccttaaaccgataatagaaacgcagggaaccagctttattttgttgctccatcctgtggaacagatgcggcagttgatgaccagtcaattaggaaaagtcagccataccttcgctcatatgccacaggacgatccgcaaacccgccgcttgattcattttggtcgccaggcggcgcgcagtagctttcctgtcctgctttgtggagaagagggcgtgggcaaggcactgctaagtcaggcaattcataatgaaagcgagcgtgctgcaggtccttatatcgccgtcaattgtgagttatatggtgatgctgcgctggcggaagaatttattggt

SEQ ID NO: 49303 - DNA, 1007 bp, Arabidopsis thaliana
gctaacatgtccatctcatatctcagatgcaaagccacaaatggccctctttgttgtagaatccgaactaacttagatcccaaagcctcaagctgtggagtgaactttagtccctgaaaattcacccggcacctgagccactggagagagagcggaagaccattgtttgccaggcgggtatcagtcctattgaagtgtacaactttatgcttgctgaagagaggcaatacctgaacaagaaattaaccaatcacatatgcaaatggttaggtaatatcttgtaacaaggatagtcaaaggaaccaaaacagcaaaactagtgataaacaagacaaacctgcttcaagtaatatttttcatcagaccagctcacaggaggcatttcgaacatttgatatccatactttctactaaaccgtttaggaagcctccttaagatccgaacttcatctcttaatgaatcaatgaaatgtctcacatcaaaaatatcctcaaaaccactgcaaacaaaaatgaggatactttagattgctaaaaaatgttaagcatataagacacatgagtgattctataaacaccaaagatagagtacctaggatcagcccagaaagatgttttgtcaagctctggaacaacgagagtgagattcaataaccgagcaacagtcaccatatcacatatctgaaacacaacataaaaatcagaatttggaaaaacatcaaatctgaaagaagaagaaaaagagaattaaagcaaagtcaccaaccgcggatcgcatttgattcaatccaccattacaggatacaagtagaataccattgcttgtataattcctgcacaaaatcaacaatctcgttaaactctctcaagcaccaacgaaccctaatgtcccctaaatagagagaaaactgactcggaggaggtagaggaggtggcaatggaacttggctcacaggggctgagaatctagaaatctgattggttaaccagtgaagatctgggaatgc

SEQ ID NO: 49304 - DNA, 466 bp, Arabidopsis thaliana columbia
  unsure (1)..(466): unsure at all n locations
nnnnnnnnnnnnnnnnnnnnnnnnnnnnctaaaggcccacgccacaccgcgcccgtggttgccgtcggtggtggtcgcgaaagtcattttttcgccgatggatttttcaggtgctcaaatgacagcgtttcgatatcaagatgatatttttcacacaataattgagcgatggcgtacgcaccgccaagcattttgaaggcgttcagaccgaatcgttttgattcgtctttgacgagaattttcttcacaccaaaaaggtttgcgagatcgtccagcgcacaaagcggtgttgggcgataaccagctattttctggtggaactggcgcgccagtttggcctggctttgcgaaaagagcggtgatgtttcgccgttgaaaaatttgttatcggcgatatcaatcttcaatgagaaaacggacatatcctatccttttggcctctggaaatagagggccgaccagctga

SEQ ID NO: 49305 - DNA, 746 bp, Arabidopsis thaliana
cctcctacaaaaaaaacagacaagacacacataagctttactattccctgcatgaaccaaaaccatacaaattccaaaaaacacaagagattgaaatcttacagcatataatctggaaaaggtgccgtcaaacagcaagaaaggcgtgtatcgccttattccgttacgagccctaatgcatataccaaaaactcaaactgttgtttgcttttacaaaacctaatcatttgtatcaatatcaaaatattatcacgaggtttagcaagaaaacctggagttctgggagagcttgacgtagcaaccagtaacaaggctgaacaaggatgaaggaggtctgaccatgttagaaagatagaagagcaccttcttaaggagctcatcgataacgtaaaaccgatcagccaagacgcagcagtaataaagcccctgatccgtcgacataatcttgtcgagtatgtataaagcaacctgaacaacaagtattaagtttcaaaatgctttctttattcttctttgatttatagtcaaaatgagtagaagtagcgtgcgaaagaaacttactttttttgtttctgtagagccaaactcaatgggtttaacgcagaaaccaacaacaccactttccattaggtaacgattaacagctccatcttcagactatagagaagtgagatgtcaaagtaatttagtggggtttcaatagcatttgcacaaacagattatattgtcagagaatatgtatgtgg

SEQ ID NO: 49306 - DNA, 607 bp, Arabidopsis thaliana columbia
  unsure (1)..(607): unsure at all n locations
catctctctcctcatccctctctcactacctcccactcgccggaaaactcgtgtgggaaccacttgatcccaaaccgaaaatcgtctacaccccaaacgacgccgtttcattcaccgtcgccgagtcaaacgcagacttctcacgtttaaccggcaaagaaccgttccccaccaccgagttatacccgttagtccccgagttacatgtctccgacgactcagcttccgccgtgtcgtttcaagtcacgttatttccaaaccaagggttttgcatcagcgttaatgcacatcatgccgttttagatggaaaaacgacaaccaactttctcaaatcttgggcacgcacatgtaaaaaccaagattcttttctaccgcaggatctaatcccagtttacgatcgtacggtcataaaagatccaatggatttagatacaaagatcttaaacgcttggcacagagtagccaaagtgttcaccggtggtaaagaaccagaaaaccccaagagtttaaagcttttatggtcgcggagattggtcctgacgtnttccgatacactctcaatctcactagagaagatatccaaagcttcgagagagactcaagaaag

SEQ ID NO: 49307 - DNA, 1298 bp, Arabidopsis thaliana
tatacatattttgttggatctatagataaaatgttttgctaatttgagtgaatttggtaacagaattcaccaatgtatcaccagcacacaagtacttgagcatacgagctttggggctcctgcattgcttctatctcttgctatgcaaggcatctttcgtggattcaaggacaccaaaactcctctctttgccactggtaattaagttgttaacttagatcatctttaatgatcactctccttacttcttataatattttgccttaatgcgtgaaacagtcgtagcagatgttatcaacatagttctcgaccccatcttcatttttgtgcttcgtctagggatcatcggtgcagccattgcccatgtcatttctcagtaagagaaatcactaaaaaaattccacacatgcaaaagtgatcattattgaacaaaatcgtaggcgcactcttgtttttctacagctataaatagacttgtgaagtcataacctcaaacaaaaacaaatgatttgtttgtgtacgtgaaggtacttcatgactctaatattgttcgtcttcctcgcaaagaaagttaatttgattccaccaaacttcggggatttgcagtttggaaggttccttaaaaatggtacgtatggatgcatatttattaaaagttgtggttcttgcaataatattttgtttttaaaaacaagatccgtcgtaggagctaatgcacagagtccaaaaataaattaacaaaaaatttatctatataataatagaattcaatcaaataaggtctatatttaaaatattgaatattttgaaatatatagttaagaaaatgagaaatgtggatatatgtctaacaagtatagtattaaaaatgaaagggctactattgctggcgaggaccatagcagtgacgttttgtcagaccttagcagcagcaatggcggcgcggctgggtacaacaccaatggctgcttttcagatttgtttacaagtatggttaacttcttctcttctcaatgatggtcttgccgttgctggtcaggtaatcatgttttctcgttgtattaatttatgtatagtttatatggttgatcaagttgtatgtagaaaatgatcattcaatacgttgcaggcgattctggcttgttcgtttgctgagaaggactataacaaagtgactgctgttgcatcccgtgttctacaggttcggtccaaaaatcacattaccaaacctttctttaaaaataaaataattgtgtaactagaacagaaatgaatttgatacgcagatgggttttgtg

SEQ ID NO: 49308 - DNA, 482 bp, Arabidopsis thaliana columbia
taaccaaaagtgtacaatttagcattaaataaaatgatcacaataaaatttggaatcctggtcttcatcaatttagtgaatcctcagctatttcttacaccataaattagttaaattaagaaaaagattatgctaatacttaaaattcaaatacttattcaacactcaaatgatttacacactgcccaatttattatattgaagttattttgtacataaacatattaaaatcctcaaaggtactagtcaacgtcaacgaccatcaagacttagctacatctccttcccgcatataaagtaaaaccttaatcctacctcctatgcaatgtatacaagctacaccaaagagtaaaacaattgacaaacaaatataaaatccctatgaacaactctagagaagaccagtggttacgacactatgagcaacaacatattcaagagattactccgtgcttcaacgccattaacatcgcgtcatcgtc

SEQ ID NO: 49309 - DNA, 587 bp, Arabidopsis thaliana
gatttttgttaaaaactttataatgattagaatttttcttaatttggtaaaaaggttttgggcacatcttgtgatggcttatgcattcacattttggacttgctatgtactaatgaaggaatatgagaaaattgctgcaatgcggttatcttttctccaatcagagaagcgacgtgctgatcaattcactgtaaagattattgttttcattaatatagaatctctctttgctatttggtctgaagagatagtttccaatttttaggatattgtatgcatttgacaggttctggttaggaacgtaccaccggactcagacgagtcgattagcgaaaacgtgcagcatttctttcttgttaaccacccagaccattatcttacacatcaggttagatcatagcattaaaggaatgaatatttctttaggtttattgctattcgttaagtattttagacttatatatatccaggtggtgtacaatgcaaatgaattggctaaattggtagaagacaagaagaaaatgcagaattggttagattactaccagttgaagtatcaagaaacaaggacaacggcacgggtaaag

SEQ ID NO: 49310 - DNA, 397 bp, Arabidopsis thaliana columbia
tagaggatcggatccccttcataacttcttgattttatttcttagtatagattcctaaagacactcatcttgtacacacatccaacattcaacaccatctttgctaatcctttgctcttatatcttgatgtaacatttcgttggagatggactatacatgctccctggtgtgctagtggaaaaactctgctttttgcaacgtataggcttggatgtctattagaaattattgtcagtgttgcactgtcatcaataatgcacgctaccttcgacatagaccaagtccaagcctcgtccatttcactatccactacagcactagccagtgggaaaacgtgacaatttgcgacgctgccgctaggagtcaataagacccctcataattccggtcagatga

SEQ ID NO: 49311 - DNA, 564 bp, Arabidopsis thaliana columbia
gatggtaaatgtattgtatagaatgtaaaactgtgttaaggcttttggatgatatgatgcaaatgccaaagctctcagtttttacatacttaataattgtcaaattgcgagaaaaaaaaaaagcttgaatgcagcaaagaataaagatctcatttcatcttaaccaaacgacattctagaagctgtaatgattgacaataacaaatagaaccatcaataaaacaaaacatagtttacatatatatatgctagtctccaaagactgactatcagtaaataaagtatagagaaacattgtatccaatattttgatgatataaagagatagatatagtagagagtaacttaaaatggcatctaaagagacgaagaacatgggaggttctttctcagtcacctcgtctcctctttccatagtctgcatctcttgacctggatctatgatcatcttcggacattcttgatctgcttcgagatttcaagctagattgtcctctatcaaactcatcagaatcacggtctctctgctgcttatctcacggtgactatctttctctcacggtg

SEQ ID NO: 49312 - DNA, 491 bp, Arabidopsis thaliana columbia
agccttgcccatacttctttcctcttttccgcagcagaacattgctttgcttcgtcctccttaaagcgggcgtggcaagacatgaacagagcctcgtccatttcgcagaacatttttcgtacgtttaaggttaagtttagcacggattggttccagtggttctgagcattcttttctaaagcagtgaacatgattggtaggatggcttgccggttatgtccaatcaagtttacaatttgatcgttgttccacaagaataaagctctttcagaaacctgaaacacaagaagaccaattggttcaaacttagcttatcttagactcatgcagatcaatcatatatgagaactatgtatgaataggaatgtacctgaaagtgggaactggtgacacaacaagcaatccgcaagaacaaagggaccatgatcttttgaaactccatcacactcattgcttctacaatttcttcgacctccccgagaaacatcact

SEQ ID NO: 49313 - DNA, 583 bp, Arabidopsis thaliana columbia
aacaattaccttcaacacggaaaggtaagaatcagtaaggccagtgtactttccaaccatagctattctcacctgaaagagaacacaccatcgagaatgaacaatggttttgattatatagacacaatggcatcaaaaacataattagaaaaagctgactaacagggtcttgcagtgtgtcataaattttagtccttgcagtccattctgtcaagtcaggctttatagcattactgcagaataagcaaatgtcaaacgactagagaaaaagccatcacagacaatcttatagtgtggagccaagagcaaaataaaacttacactcaagagagagaaaaaagaaaagatggttcagaaacaaacctaagatttaactctcttaggatcgcttcatgagctttttgatcctattgaagagaagttaacaccaaaagaatgataagagaaaaaatccagcataggaacaagctcattagattttagtaagaaactattcaactgaaatgtacttcccttaaaagcagaggaacgtgcctaatatttggacatcatagagcgtactatatcacttctgggaaccata

SEQ ID NO: 49314 - DNA, 515 bp, Arabidopsis thaliana columbia
aaagttatctacagagttatggactttagcaatccaatcttttttttttcttttcttatacgtcgttttattgatcttagcagtctttttgtccttggttattttctgaagacaaaatttgtatttttcatacactattctttttggcagctactgatatcacctcggaaatataaaatatggcctctttgatattatcatatgatcctaattacagtaataatcttttgttcttttgtaccaatgcaaaacataaaagaaaaagtacagatcaaagaagaaaagaaaagaagataaacataaaagaaaaagttttattaaaaaaaaaatttgaaaaaagagaaatcaattctttcgattttttagacctagaattgacctcttgagttggttaaggcgactagcgcttgcgtcccaacccatgagtattacttgggttaagccccaagcaatccaagaagaaggagaggttcgatgttggcgaaagacgatggaaacagtaccgtttggttcgt

SEQ ID NO: 49315 - DNA, 518 bp, Arabidopsis thaliana columbia
gagggaattttctctccatattcttcatctagaattttttttcaatatttcacgcatccgaataataagcaaaatatttgtacaagccactgaattgaaaatttgatatattttatgccagatactatgaccctgcatagcaggggcgataatgctagtagtcctacaaaagagcagcaattattatcagtaacattaataaaattctcatggcctttctgcaaaggcaattgtctgaacagggagcttccagcctgaatctctgcatatttcacaacagcatagcaagggttaggatgtgagtcccaaacttccaacaagaaagatgtaagaaatcagggtacaagatctccaagaaacatcacacctgaaaaaaattaacaatgtcaacaaaacaaagattcgtgttaatgagatgtatacaataacaggggcaaacttttggattctattctagtagcagtttagatgttgtaaatagaaaaatgattagtgaaacaaattcttttcatgtggga

SEQ ID NO: 49316 - DNA, 359 bp, Arabidopsis thaliana columbia
ctagatcaccgaatttctcctgttcgcttctcgatttcgacttgttaaattgaattgcttttgagttacttcgaagcaaagacacaaaattttgaataataaattatcatttcgtgattctagggttgcttaaatatgtgtgttgttatattgcttcgtgactgtttttagcaaacattgtgttcatcacaagcttgtttgctgatcatgtttaaggttcgttgaagaaagtcaatgaaaatttaggtcaacgttccaagccatgtgagaccttgatttcaacttttgcatcaagttagatgattttagttgaccacttgtagcagctttgatcaaagtttactaagatggatcctttt

SEQ ID NO: 49317 - DNA, 524 bp, Arabidopsis thaliana columbia
gcatagtcagagtcactgaaaccctgaactctgaaatctttttctctggtgaaaaccagattcaaatctgtagacccctttaagtatattagcagccactttactgcaatccaatgaatcttacctggcctgcccataaacctgcttagaactccaatagcttgagctacatctgttctggtgccaaccatggcatacataacgctgccaatagcacttgagtatggaacttttttgtctctaataatgtcgattcccagtattcgactagctgcacccatatccttcatttcaaaacatgtactcaacgcttctttgatcttgttaatttcagtcatggacttagctgctatcaacatatcatccacgtatatcagcagatacacaaactcctcatcactgagttgttttatgtaaacacacgaatcatgaccacttctgataaacttctgatccatgataaaggagttaacttcttgttccctaacgtggcgcttgtttaacccatacagtgacttctttac

SEQ ID NO: 49318 - DNA, 556 bp, Arabidopsis thaliana columbia
  unsure (1)..(556): unsure at all n locations
nnnnnnnnnnnnnnnnnnnnnnnctaaagttgttcgtcttcgcattctgtttcacacgacgaaacgcctcccattcaggggaaggtaaaaaagaatgcgaagaaaaacggtatgtgtttcatgtttgtttccttaagtgactttagtacagtacccgtactgttttcacgctgtcaacaaaaaacgcgcccgaagcgttgggcgatacactcaatataaaggactactcttcttcaacttcttcgacgaagttggcgtctttcaccgatgttgcggcacgacgtgcttcgcctttgtgctgcagtttattgagctgccgttccagcttgttgatcaattcgttaattgcggtgtacatatcttcatgtttaccactggcaaccagaacgccgttaggtgtattgattgtggcgtcacaacaaacccttgtggctctttggacagaatgatatgtggattaatcagatgtgtttgccatttttccagttttgcgagacggtctgcgacatgttggcggatggccggagtaatttccatttgtttgctggtaatgttc

SEQ ID NO: 49319 - DNA, 983 bp, Arabidopsis thaliana
cgctagacgattcgcctctctatacacatgagagatacggactatccagtccctagaaatgaagccatagcacagacgtactaggaaagacagcggatcgaatcctcgatccctgcctgtaagaaacccaccactaatgtcgagtccacctccaactccaaccgtctaatcccccgctcccaagcaatgtgtagaccataatagaccccccacaattcagctaaaggtgctgagcatataccaatattcaaaacaaaaccaacgcaccattggccctctccatctttcaccactcctccagctgtagctaaacccggattacccctagatgcgccatcggtattcagcttgaaccatcccgtgctcggtggggtccatttaatgctcatctccacctcactcccccgcatagctcctctccgtaaattcagatgagcaatccaaatttctctagcctgatccacaacaaaacgcacacgatctcgacaacggccattctctccaaacacgttcccacatcgccatttccaggcccaccaaaccactatcgcaaacaacgtggcccagggacagcctcgtatctccgtaacatcactcagattttgataaacccagtccaagatgttgctggcaaagaaagctgtgatcttaccccgaggaacaaggcgaccccagattccggctattgaaggacaatctcggagcacatgaagaatcgtctcatccccacccttacaaacctgacaaacgcccgacgctgataaatgtcgccttcttcgttccacatccgtcataataacttgatggacgactaaccaaatgaacactcgcactcgttctgttgtagttatcgccaaacccgatcaaaaaactgcctcatattctgtgcttgagtctcactttgtaacaagaacgaataagctgatttcactgtgaactgaccatttgcggttgctcccaacttgttctatcattagaacctg

SEQ ID NO: 49320 - DNA, 697 bp, Arabidopsis thaliana columbia
gactgtttgagcacttttggagcagtaatggtgctagagttggaaagatctaataacgagagttgttttcaaatacatgtgtccccaaactatctctcccgaagcttttcttgtgtgagaaacctaacttcatcgcatcttgccactttagtgtccgtttaagaccagcgatgctagagggctttaggttaccttggtcttgattctacttgtgcacttgaagattctagagagttatgtcggctctgtttctcgtggcgtgtgtcgaaggaccgccatgcgcgtgggctctttctgatggctgaaatctcttgtttttttgcctccactacctgtagccggtgatggatgaaggtggatgctttgatttccggtcctagagtctcgcatctcaagcgttggaagcttttgtttgtagatctgttttggggtgccttctttctggtgtttcagctggtcgagcgtgctttcctatgctgtaatgtggtgtcgcctctcctccttaaccggtcacattttttccaagatctctcttggtctaacccctgcattttggctcttgcctgctggagttatgggtttctttgtgtcgagttgttcgcattgaggacaacttactcccacacgcttaaagcttttgtccactttgtacgtgttgattttgtgtgttggagtttgaatcgagaggttttctttg

SEQ ID NO: 49321 - DNA, 530 bp, Arabidopsis thaliana columbia
gggtaccaattcatgaattaattaatgaaaattttgcttaattctccgtaaaaaaaaaggaaagagtaagaaaaagagtagtatgctgaggtgtcaatcatagaatgtttcagttattggacaattgactgttgaattagtataattagataacaggaattcataacatagaagaagccttaaactaaatcaaataattggtatacatgtggagttctcaaggagaggatagttaaaacctcaacttataaaggagcaaaagagcatccgtgttgacgagagagcttgaacaaccacaagaaaacatgctcttaataatcatgctactgtcctcaagaaaaagatgctcaacgaaaacatttgaggcaaaaagcttccaattgtagccatgctctacaaacatatgcgaatgagggctagagaggagaggtcgaggcatcaaaagcacaaagggtcgatggacaaccctaaccaatgatggcgaaccatccacaacaccaaagaaaacctctcgattcaaactccaacac

SEQ ID NO: 49322 - DNA, 606 bp, Arabidopsis thaliana columbia
  unsure (1)..(606): unsure at all n locations
nnnnnnnnnnnnnnnnnnnnnnctaaagtcagtggcacgtttggcgaaattcagaatgattctcaatttgcccgggtgtgataccattgacggcacttacatatatattgtcggtatcaccgacgctgatggacagaattaatggctatctcaatcaagaccccagaagatatcgaaaaaatgcgcgtcgctggccgactggctgccgaagtgctggagatgatcgaaccgtatgttaaaccgggcgtcacaccggncgagctggatcgcatctgtaatgattacattgttaatgaacaacacgcggtttctgcctgcctcggctatcacggctatccgaaatccgtttgcatctctattaatgaagtggtgtgccacggtatcccggacgatgctaagctgctgaaagatggcgatatcgttaacattgatgtcaccgtaatcaaagatggtttcacggcgatacctcgaaaatgtttatcgtcggtaagccgaccatcatgggcgaacgtctgtgccgcatcacgcaagaaagcctgtacctggcgctacgcatggtaaaacaggcattaatctgcgcgaaatcggtgcggcgattcagaaatt

SEQ ID NO: 49323 - DNA, 583 bp, Arabidopsis thaliana columbia
tatagagactgcaatttatttactaatgactctagaatgacaaagaaggctgagcgactagtcccagttggacaaaattcacccaacagacacacttagacctttgtaagctccaaaagaaaagatgaacaaacaatacagagataatgatggtaaagatagagatagataccagctttccgagtaggcatccattgactgtgatctcgagaaacctcttcttcaaaccatttaacccaagttgatgtatctttaacctcatcactggccgcagtattgacatcaatgcccaataatttcagcatagcttcggtgtcatcttcaggtttgctattctcgtcttccatttcctcatccagacccttccgatcaacatcgacctctccagtgttagctgaagcaatatcatctccatttctacctgagacctgttctgtccaacctgtccaaccacctacttcattgtcatcagaggattcttctttcaaaattttctgcctgttttcctcctctttctccagccacaataaccatccaaaagctccttcttctccaactctagcaccattactgctccaaaagt

SEQ ID NO: 49324 - DNA, 461 bp, Arabidopsis thaliana columbia
tttgtagatattattatcgaaatatctaatatttcaaattaaaaacgaaagtagtttaattgtaaaacaatctagctcttaagttgttgataccatttaacttttaaggattagtgtcttcatgatgattgagaaaaggaagaactagaaaaagttcttaaaataactgaacattgaatacactaaactcctatattttattccaaaaaacaaaaaattaaatgaattttgttaaattcaaacccggtcggttgaaccggttcaccagatcacgagttaatggcagatttttgtggttgttttttggtattaaaattacaagatgttaacactaaaccatggagaggtgtccggatcgcgggttaaccgatcggaccgcacgatttctggatcgggcgtgaaaacactcttattaatataaactatatttgcgatattacaagtataactagtttgttttg

SEQ ID NO: 49325 - DNA, 823 bp, Arabidopsis thaliana columbia
cctcaagtgtttcatctctagatgctcatatagaaagcggattgcacaggtttgatcttctttgacatgcactcatcatcaaatcttgtatcacttagagttgaattttaatagatagctttaagaacaatgaatgagaaatgtgataagagaatactactccctttgatgatgaagaatgtttgtagctgttgtgttctctaaccctaagtttcgttttctcgatacagcggtgttcatctaaacacagtaacccagttacttgaaaacatggaaagcacacagcttcgtgctcttcgacaatctaatatttcccctgtggtgtaaactctgatctcttattagcaattagatgtttctttcttctgttacatttttctagcaagcaattgagattatcataattgatttttgtccataggacaattgatctccagctcatttgaaaatttcagacaaatgacaagtagtgatctccaaagatagacacatacggcgttcatcttcttccaaggaacacgcttccctaatctcctccaccaaagagtcgtttccacaacagagagaaatatatggttgtgacttagtttttgatttccgtctgcgtacccattgtgcggaatctgattccataatagctctggttggttgctagctagatatctccgctggtcacttttgggatcagatttagttggcttgattcttcatgatgactgcatattcacgattaagaatgaatatgtgaatcttttctgcaattattgaaatagaaaggtttttcttttgtgtcaacttttgggaaccgtctttgagctatgtg

SEQ ID NO: 49326 - DNA, 266 bp, Arabidopsis thaliana columbia
tgggaagttaagggagcaatctagaacatgaaagtttttagtgaatgtattgtgattgtttagtgtagaatcgacttcgtcgttttagagttgtgtcaggtcgatcaaggagatagaaggatgtatatgaatattataagtagatgaaggcatcgtataagtattcgggagactttgaatgtacgagttctgtatacaccagttagatgtcgactgaatactgtagatgaaaattttgacatgtatgatgtggtcagaaaagggtc

SEQ ID NO: 49327 - DNA, 592 bp, Arabidopsis thaliana columbia
cccaactcgaaaatcccacaatccaatttataagttcatatccaagcgtccttgttacctcgagatgctccccaccaaaatttttgcttgctctaatggggcctaaacctctggcttccttaatagcctcacactgacttttatggcactcaagcatggatttccacattttgctaagcctgaaagatggagttagcatctaatgagaactcaccgtaaaaaccaatcatagttatatactgattgcatttaaacttcgtccagcttacccttggatcaattcattgagttgcagccatagctcttcgtctcttatcttgttaattgtaactgatattttgtcaacaacttgaatcgcaatccttatctttgtggacaaacttctaactaattttcgtgttgaatctactttttgattctcggcacctctttcatccatacgcttaagcttccttaactttttctcatggttacacgcatttttcctcggcctacatgacaaactttagtcaaactggaaaaaagtacaacagaagaagagagcatcaacaagacacatctcagtatcaacgagagagttatgcacacatac

SEQ ID NO: 49328 - DNA, 607 bp, Arabidopsis thaliana columbia
tatgagatttattgcgattgaatctctgaatcagaccgagaaacgagagaagaggaagaaattgagacctggagagcgtgattgaatcgctgagactcgcagagggaattgatgaggcctcttagaaccgcagggtttaagtctttccctcgtttcagccattcgtccagtggaggagtaaccttcttttgttcccgtcccaatgccatgattcgactatgtgaagtctcatttagcttcggcgacgttagggttccggcgaatcgaatcgacggtaatctcctggacaggagattttttattgcgtatcgtccaaggcatttcattatgctctctattctcaagagatacaagtcggtaattaaaatcttatatagataaataaatgaaatactgcgtatcgtccaaggcgttgcgttatattctcaatctatataaataaaatgaaatatggggaggtaattaatccattaattctaaaatctgaccaagaatacaaaagaaaaaaaaaagctatggacatgagcttcgttggcccaaaaaaagttaaaaggccatttagagcaaacattaaaagaatgctacttatgggagaccaaagtgatag

SEQ ID NO: 49329 - DNA, 573 bp, Arabidopsis thaliana columbia
cacatgcttgcgggtttataacttgaaacgtttgacatatgttcgatgagtgttgtgggatcaattggtattctatgcttcctagagatgcaaaaggttgcgggtttgaatccccaattttgcaaaaaattattttaacattaagacgacacatcaaaacgacttcgtttggaacacgtcatcatatacatgtacgatgactcagcaccgtaacaatgttgactaatgtccgttagattaactattattttttcacgttttataaagattaggtatgagattcaaaatatattgaactttagattcaaaagtataggtatgaaaatccccttttccctgctgtagtctccctcagatcaatacgtggctggttgttccctaatcgtctccaacatctcaaccattggcatgtatcttgttggatctatagcattgttgaaagactcggatatgttgttgtgaacatcaacacattgagatgtgggtgaaagaaagctaaattgcagttctttgtttcgctccacgattgcttcatataggcagatatcatagcttttgacattctccatattt

SEQ ID NO: 49330 - DNA, 579 bp, Arabidopsis thaliana columbia
aacggaccagatgtcaagcatgtcatcaaggctagcatggacgatactagaattgaccattatgccattgggacgtacgatgattcaaacgctacatgggtccccgataatccttctatcgatgtcggaatcagtaccggtttgagatacgattacgggaaatattatgcgtcaaagacgttttacgatcaaaataagggacgaagaatcttatggggttggatcggtgaatctgacagtgaagctgctgatgtacaaaagggttggtcttctgttcaggtaccttttcttcacgtagcgtgctatgaacgttaggtctttgagttacttgttacccgagttagggcttaacttttttttgtaaccatgatcagggcatccaagaactgttgtattggacacaaggacgcataaaaacttagtccagtggccagttgaggaaatcaaatcattgagactaagcagcaagaaatttgacatgactattggaccagggactgtgcgtccggtcgatgtgggttccgcactcagctagacatagaggctgagttcgagatcaagaccgatgatctcaagtta

SEQ ID NO: 49331 - DNA, 370 bp, Arabidopsis thaliana columbia
gaggatccccgcctccatcagcaactactactttgagcaactgaagaacatgaagctgtgtttctttagaaactcccatactagttaaacgtataaatctatccattttttcataaatagctttgtcctttaccaatccccacctgcatcaagaaaaacttgtgagctgttgtgaccaaaccagaacattgtttttagagtactaggagggtaaaagtaaatcagtcacccgaatcttgaaccagcatgacctgtagtcttggagagactaaacaggctcaaatcttcatcaactggatgtgtaataggtgagaaatgaggccagtaataagcataatcatgaagtgttttcacattaggaccatcaaga

SEQ ID NO: 49332 - DNA, 901 bp, Arabidopsis thaliana columbia
tttttgctttgtttgacctactaatactacaaggtttggtctacagaagttacaaaattacagaataggtagaagtttgaactttaacacgactaatcgccagtgagagctcgagggctatggtcaatagtggaaagagacatgcccgactgagccacggctctgacaaacgccatgtttgcagtcaaggtaggagctccccatctatcacctgtcccaaacacagtcttgttcttcatcgctaacttcctcgttgttgggagactcatcacacgctctgagggattgtcatttaccaccctgtcaaaaatcacatcgaccatcaacaacaattgtaatgagtcaaagtattgaactttgagattctctgttgatacagagcataatgtgacttacattaggctcttcaataactgttcagctctgagtttctcattgggtccagcatacatggatactaactccttgaactctgagaaaacactcttgcatacaataccacgcttccctgataatacagttcccactttgacaaggcctggcttctcaatttcagatctcgcctgcatataaattgtcaatttcacaaaaaaaattgatagactagtgataggaggcaatggtgaacttttttctgtacctgagcaatcacaaaaacggtattgcccttaaacttttcttctaattcgatctcaggcatatccacgagtctctctgcacacccattactgattccggaaacgagagcaacaagagccgttgtgtcgaaattaatgagacagtcttcaccaagcaatctcatggaggagattacagtagaaaaagcatctttttgacttagctctgtgacctctgcttgaactaaaacctcagtttcaggagaagcaagtgaatcacattg

SEQ ID NO: 49333 - DNA, 879 bp, Arabidopsis thaliana columbia
tcatgctgtaaatgttctctgaatctgttaatgcaaaagcatcattagtatgtattgcatgcatgaggtcttgaatattatcattggcgttttcaatgtatttgcattgcagaatatagggcagctaacacaatacgcaattttcaggtactatgataatccagaacatctgaaagagcttggtggtatcgacattaaaaattatattgctagttcaattgtggttttcaatcttgatactaaacaagtcaagtggatcaaagagctagatttgagtacggataaagcaaacttccgtgcttatatttattcttcaccaacggttgttgatttggatggcgatggttatttggatatccttgtcggaacttcctttggcttattctacgccatggatcatcgtggtaagtcttcttgttacttcctgctgtttattttcttgcattgatgacaattctgcatttcctgttactgtttttaccaagcaatgcttctagcaggagctgtttcttttggatcggttttatgtgattatgcaactatagctttcatagtcaaggtcacacacttcaaaaaaaaatctatgttaagtttgaatattccgtttccctgcaagaccaaaatttcactcttattagattcgtgatcatggtctatagttagccaggtgactatacagatattctgcatggcctaggagaatccatgtcagcccatgccatgacacgcccattctcttcggcgacgaggtgaaaagatgcccgtggggacatctcggtaatatcatgcgaacaagttatataccgccaccctaggcctcgaagaatccatgtcagccacgcatgacacgccattcttctcggcactcagcaatttttg

SEQ ID NO: 49334 - DNA, 419 bp, Arabidopsis thaliana columbia
tctaaaatgtcttctctaggcttgtttaacaaattcagatagtacaatatccatgatcaagccatggtcttgaatatacatataaactctaacagcacacatcaacaagagtaaccgagcagtggacgagctgatttgacgtttcggaggtgatgaggtgtcacttttccgagaggcttgcagaagggatgcttcgctgcgaggtttgaccttagtatcccgcatggcagcagcgagaatgccggtattaggcatagcatgagcggacggttgtcgagtgtctcttgctggtattcgtggcttccatgtgagaagttggtgcgagccacattcgtacaggatttcaaaagcatttggttcatggactcggtgcgatgaggcgtggtctactgtgccaactatctgtcgtctttgggatc

SEQ ID NO: 49335 - DNA, 551 bp, Arabidopsis thaliana columbia
ctaaaggtggctcagatccagaagatttcgggcagcaacggtgtcgacaactccgtcgactgtgcgggcatcccccagatccgttgagaaggcgctggattgtcttggaactcggggcaaaggtgccaccgtcggtgctcctactcccggtgtgcgtgcaggtgtcgacgtcttctcacacctcgtcatgggtcgacagtatctcggatgctgcgagggtgacagcgatacacagaaggtaggtagtctgaatctcagtgacagcaacgttaagctaatgacgacagttcctgccttacctgatcgagcagcatgcaaggggtcaattccccctcgaccagatggtcacctattaccgtgtcaacgagtttgagcggacgttcaaggacgtcaaagagggcaaagctctgaaggctgttcttctgcggacatagctttcttgattttagattgatttagcgtagtattccatattacgttccagtgttggtcatgaaggccgaccgtagagcgccgaaaacggaggagagttgctcgttgaacacaagagg

SEQ ID NO: 49336 - DNA, 585 bp, Arabidopsis thaliana columbia
cctaaaatatcaaagttttttcctggaattaaaaaaacaaaaggcgttcttgaaagcttgggaagctgtgtgtagcggaacaggagatgggcagtttgtcgttccggcagggatgacatttatgttacagcccctgaagtttcaagggtcttgcaaatccacccctgtttttgttcaggtactctgtttttcccctgttttttttttccttggatattaatgacgaatattttgaagtaagtaattactagtttgtaatttaattgaagatgttaggcaagctggttgcaccgagtaaaggaaattggaaaggggacaaagatcaatggattctttttacagacattgaaggacttgtgattgaaggtgacggtgaaattaacggccagggttcgagctggtgggaacacaaaggctctagacctaccgtgagtatcacgttagctgtttgtttcccaaaacattgattcgttttgtatgcagttttagctaaattaaaaacaagataattatgatttatgagattaggcattgaagttcaggagctgcaacaaccttagattgagtgggttacgcatttagata

SEQ ID NO: 49337 - DNA, 315 bp, Arabidopsis thaliana columbia
aatccaaagactctgagaacacgtcaaactcaaaaaactcatgaatgtcaggctttttttggaacgtttggggtttcaataaaacgagcaagcatggagtggtgagaaaatggacgaaggcaggcaatttcgatttcggctgtttactagaaacggaagtttcggcacggcactcagaccgcgatgctaactatgtgctcaaagattggtctatactctcaaattatgaagagcatcggcttggtaggctacggctggtttggacagacactgtaagtctcacactgctttacaagactgcactacttatcactt

SEQ ID NO: 49338 - DNA, 836 bp, Arabidopsis thaliana columbia
aataaagcttgttttaattttgagtgctttttaggtattttctaataaatttatttgtttgtgtcaaaaatgaattaaagctttgagaggaactggttgaggagagatttgaacgtggtaggatttgggctgatcggatggctagctccgtcgagcattccagcgataaatgggaagagcctgacgggtctcttcttcgatagcatcggaactgagctcgctcacttcccgactcctccagctctcacttcacagttctggttgtggttggttacgtggcacttaggcctcttcctctgcctcactttcggacaaatcggattcaagggcaggactgaagattacttctaaggataactattcttgttttcgtttgtactatatgctctctcttggttatgtgtaatattatcaatcaaaacaaagctttctttgctatttgatgtttcattctatatctcgacaagtctttcttatatgatcttgattttaagaatgtctgtcagtctaactaaagtattaaatgttaaaagcgtttctcgagggaaagctcacaaaagattgggataatacttcaaaacgagacatcacaatacgtctttgacttgaaccatacaaacagtttttgtcttgcaatctcgaatcttttaaaaaatagagaaattatctctcgtttcttcttactctttcatgttttttgtattaatcttgatgtgtatatgttccaataaactctaaacatgcatgaagatttgtgaatctaaagtctttaacatgtctttcgactacgaaacaaaaattgatgaggaaaggtacaaacttgaaagtagatgaaa

SEQ ID NO: 49339 - DNA, 607 bp, Arabidopsis thaliana columbia
aaattagttttacttaggtattgaagcttgtattacagaatctaggagaagaagatctagactcattagctctccgtttcttttgaaattgcgagcttcccacattctcaagaggcggacagttatatgttgcatagatgatccgattgtaagcttgtctacagcgatggattgaagaggtgctactgtagttgttgattgtgttgttgccataatgatcgtacgtgattttgatctttgaatctgacaaatgaaagatatgatattagtttattcttatttaccattagttgttgtcgttaataagttgaagtttatgattccaaaaaaataaagtaaaagttattgagaagagagacttacttttctagatactcttacggtggttacaaagattaaactattttggtagtgaatatgtgtcatatatatataaagataaatatttacattatgtaatattctagttggaatgattagaagtttgaaagagtatttatttttcttaaatggatattattgtttagaaatgggtatatacgttattctgattgggaatttttgtagggtttttaaacgtcctagatataaatgagttagttaagta

SEQ ID NO: 49340 - DNA, 549 bp, Arabidopsis thaliana columbia
cctgaaatgttgactggataacataaacatttgggtagattttgcagagatcatgctgcccaagttttgtgtggatatgttgcgtaatcaaatcgactgcaacgtgattatcacctcctcgaggaatgatcacgtcagcatatttctttgaagggagcacgaagtcatcaaatgccggcttcacaaactttgcatactgtaaacgaacataacatcctcagaaaacaaattaggcacatgggaagctcagaagataaaagagatgttttacagaggagcatctcaaaggatggaataagaacatatagagttatctagtaaaaaaacaacagtaggaagcagaaaaggaagaagaaaccagagaagagacacaatgagatgttccctagagcagaatttccatgtatttactcatgtctcatatacacacacaaaataaagctacctaactaggttagatgaacctatgcttacaaatcctacagcataaatcgaaaagaggactgacctgttcaagcacagaattgacatccctaccctctcaactgt

SEQ ID NO: 49341 - DNA, 565 bp, Arabidopsis thaliana columbia
tacataagtttgataaaccatgtcaatattgctgatgatttttttcttacttcctttgttactattagtgatttatttggttatttttcgtcaaaccatgtcattatattaaaggggttatataagtttaaactactatgactactaaacgatatgtagttagtgaagtgacttcttgcagatttagcaaatacctcagctacttggttagctcctttttcacaaaactacaagtgggatgagctaactctagtacatctctaattacagtatgttggtatggcaagatattttcgaaaaaccaccagataaaattacctaattaaaaatcaagcatcttaatatataagactctcattcaaagtgctacgtatctaatcttaaaacttaaatggcttataaatggatttttttcagtggtgaaaaatcccaaattatgttcaatccaaggatcgttcatttttgcactttttaagtttctaattgagtacaacgatatatgtcaatgtcagtgtaataatacaaaaaagttgtaaactaaagtcggaattatttgattttcttg

SEQ ID NO: 49342 - DNA, 750 bp, Arabidopsis thaliana
caatacttgacaaagtcgctgtaggattttccttgcctatcccatttgctatgtcacaaattaagccagacttgaacaaggaaaccaaaaacaacagaaaaatacaatgttgtgactgtgattgattgattaaaaatgaaatcaaagatatatatttgatatttagaggaaataaaaaagcttacagtattacaccgaagaagatcggcggtgccagcatgaggaccagccaaggatatatagttgtgaacaggaggcccaccttcgcagaactcgattaagcctcgagccactaagctcccctgttccatcattcatcaacatccatgaaacttaaacaatatgtacatataatgatcaaaacccgattttagggttttcaagaacctgagctcttccaacaatgttgtatccttgactcaactcttccatctgcgtcaccttatcacacgctacttccgcttgttgtgtaagtggtattaaccatgaagcgcctattggatttccctcgccaatttctctggattccataccaaaaaaaaaaaacaagaatcagatcaaaccaaagacatcatcataaatagtcactttgcacgtcttaagtatcaagaacacataaatagccataatctttggattatcaaaaggacgaaagagttgtggattgacttacatgcaaaagccaggtgagctagagaggttactgagaagctgtgtgaagttagcatttggagcatcagaacattgtgt

SEQ ID NO: 49343 - DNA, 571 bp, Arabidopsis thaliana columbia
ctatttcggttcttatatgaatttttgacaacctttgtggaatcttctcaagttagtttatgtaaaaaaattggctaaactatttaacttttggaacaaaaatttgaagaacatgacagtttctttaagtattttactattttcccaatttgaatcctttgtatttccaatagtttcttttaacccccagaaatgtttgggctaaactgtatcatcctaaaacacattgatcaaaaccaagaaaacataaattgttaggtatcaaaacgtaaattaacataaccaatataaattcagagacacgagctttttaatggcttctctcctcgcgttatctccttttgtcgatttagccctaacctatacggctgctacatccagatttcctcatcctctattagggaagaagaaccaaaaccctaatcctatcttctcctcttataaatcgcttcaacaacagtttctttctcttctgatttgatccatgatttctcatctggaaccctagtttatacatccatcgggtgttactgttctttatctgggcaatcagtggttagtcaaagtatag

SEQ ID NO: 49344 - DNA, 414 bp, Arabidopsis thaliana columbia
gagatgataagctcttggtttatgagtatgtcgttaatgagagcctcgacaaggtcctcttcagtaagtttttcttctcaatgagattggtttgtatattaggataaatgatattgaaagaagatggttttaacatgtagtggtcgcttcatttgaatgcagaatccaacagaaaatcggagatagattggaagcagaggtttgagatcataacaggcattgctcgaggactgctctatctacatgaagacggcgccaaactgcatcatccacagggatattaaggctggcaatattttgctggatgaaaaatgggttcctaagattgcagattatgggatggctagactctatcaggaagatgtaacacatgtcgacactcgtgttgcaggaaccaagtatgctctctctatt

SEQ ID NO: 49345 - DNA, 493 bp, Arabidopsis thaliana columbia
taagaaattgaatttatttttaccatattttaaatactacatatatttgttttcatattgatgtaagaaatataagattgcattaatttgctcaagaaagtactatcacaaaacatataaatatcaaaatcttcaaaatatgtccacggtatttcaaaaactattttcagtaaaaaatgaaaataaaaagctaaaaaataacagtaatttgctgatcaaaatcttatttttaggatgtgttggcagaaacatgaaaattacgatatatttttatttaatccacacgaaaaagttatttactataaagttaaaaacaatttttaaaacttcttccttcaatttatttgtactctagaaaataaaatttgttgcaaaataagtaatgttcacattatttaatgcaaaaacttattacttttatttcttttgactatttatttgtattctgtattggttgcatatattattttacaatagaaattatgttttaata

SEQ ID NO: 49346 - DNA, 542 bp, Arabidopsis thaliana columbia
cacgctaaggttggttggcaactacttcatgataagacaagtctttgggctcgagtttttagaagtaagtacaaagttggtgacccacatgataaagcttggacggtggctaagagtaactggtctgctacttggagaagtatcagtttgggactgagagaagtggtgctcgtggagttaggctgggttattggagatgggagaacaattcacttttggactgataagtggttgaataatacccctctgctagagtcagttctgattgatgtcccagatgagctgattaatgctaatgcaagggctttctggaggaatgggagaggctgggatgctgcgggcttgagtgtgtgtccccggagaacatacggctcatgctctctgcagtagtaattgatacagtaacaggggctaaggatcggctctcgtggcgagataatgcggatggtaatttcacggtgaagtctgcatactcttgtctgacacgggatacgtcacaacagcaagatgtgagcagtttgtctggccggatttggcgagtg

SEQ ID NO: 49347 - DNA, 613 bp, Arabidopsis thaliana columbia
cgagacattaccttggagttgtggaggtggttgatgcggagattgttttcttcagctcatcgaacatggaacgaggagagatgcttcccatggctaaccaaggtgatatcttgcaagagaagtttgcaccaaagacactgttgttgcctcctttctggtttcccttgctcaaccgagcctgacaatccgcggcaaagctctttagtctagtcaacgcctctgtctctcctccaaccattgtcggtttcccctcctgagcagaacaaaatgttaactcctaagagaaggtgtaagacagtaagagccgcagacgaatattggacctaaagagaaacgttcattgatcctaagaagaatccatggaccttcaaacagcactactactattaacacttgatagtacttatcgctatcactctatgggtaagtagctcttctcctatagaaatggaaccaattggcagagtttgaattataagtcccacaagtttccacgttttctaaatgcctaaacctagatggataaaggaatcaatcaagctaagcaaagatgaagaactcagacgtggctagtcgtaggagtggggctaatgcgaagatctaggagagaagg

SEQ ID NO: 49348 - DNA, 526 bp, Arabidopsis thaliana columbia
tgaaattttttattacccgacgaggtaaggatcggaagagccttgaactgggaagtcgacgacgccgccaacagagctctgacgaccaccgccgagtaagattcgcgcgtgtctgacacgatcacgcgctctaagttcactcagctccactagctcgtctagaggaaaagccctttgtaaaggaagaatcttggtcggaccagctgcgtatttcgcataggccgaaggtaacggcgatgctgcaaaaccagtcacggccaaagccactgctagagccgccgccaacattagggaacgaagggtacgcattcaagcagctcgtggagattatggttatattcccgatgaagacacacgttccagagagcgacacaaatgctcgattcttcgcatcgagcagagagagagacagaaagaactgtcagagagagagagagagagagagacgttctcaaatgttttagcggagatagtggggactaatgaaatttatatattccaaaattattgatttcggtttagtttg

SEQ ID NO: 49349 - DNA, 492 bp, Arabidopsis thaliana columbia
caagattttgttacaatcaagtgaaataatacctcatcaaatgccttatttaatagacacgctggcaactatgtacgctgcgtcaatctcatgacaacagactgcagaaaaggaaaaggcaagatatctattgacagcatttatctaagcaagcaaacaagatgaaacacgatatcaagatcaagaaggaagaagatgcaacttacagagtagccacaatggcatttttctgtgcttctctcagatggaacttaaatgcttgtttatccggtttcatggataaactggagtcttttcttgtgttgcggattacactcatctagcatctgcgaccagatgttgtgcaggactgtatatatatcgtccctctctggatgaaaaatatcctcagcaaagaatatatgaattttgtcctcaatttcgatccagctctgtcctggaatttttttaacatcatgctttttcattgagctcctcaacaatgcagcattt

SEQ ID NO: 49350 - DNA, 589 bp, Arabidopsis thaliana columbia
aaataaaatgttaaaaatagtgataaacaagacatcttttcttttttatttagcatggaattcgaacataggctctagtagtattcgtggacccaaaaacagtctttaatctatttttgttttgggaatactccttttcgcaaatacactcgaataatgattttcctctcttatgaaaaccattagaccaaatgtttgatagtcatcataacagttaaaaaatggcataattgcaattactatgtctgagatgtttcactggtagcacaacagagaattttccgttcacaaactaaatgaaaaagtttttagaacaattgtatattgataagttttgttgaactaaacaattcatgccaaaaaaaaaaaaaccgtggttatcactcaaagtactaaaaaagttagcacatgtttgatagtcatcataaatcaatataggctcgaccatgcactaccatgttaactttttggatgtaactatgagttctctgatttggggaagatatggcttctttgccaccttcaatttgtgtatggtagtctcaagtcacttaagttgatccgattccttgttaattaatttgaacaa

SEQ ID NO: 49351 - DNA, 390 bp, Arabidopsis thaliana columbia
tgattactttaaagtcttacttatgttataaaaagtcttgttcgttgtagacttgtagtcttgtagtcttgtagtcttgtagaccaaacaaaacaacctgttattctttttatttgttattacgttaagtcgaacttaacgtacctgtcagtctgtatcaccacgaaactaactctttaatacagtatatctgtatacgtactttaaaagagtactattgatcaacgtagcagctttcgccatctcaccatctctcacgccgacatggaatggatcaaacgccaagtgttgttaacgagtagggcacacgttgccgacatggattggatattttgcccaaaatatagtaggcgacaacgagggaatcttcaaaatgtgagtgttggttgt

SEQ ID NO: 49352 - DNA, 469 bp, Arabidopsis thaliana columbia
ttttcggttattcagcctgataataaactttcaatgtcagataatgaatagtgattacgagattctctttgcagctgacgaagaggaacaaataaaagcaagtaccagtttttcagctgcgaagatgtaataacctccgaaccctgcaaaatcatgtaatcaacgagcgcatcgttcgtaatacgtggttggaaattaaaaagagtagaattcttgaactcaccttttgacttattgtatcagcccataactgtctcgaagctgaattccgctgcaaatcaggttcttcagcaagcgccttctcaatcatccccatttgatcagcattcataatactacgcttccgtttcttcttctgcttctcaaagacaaggaaggtttcagatttctcatcctccttcacctctcctgatgcactgcctttaaatcgcttgctcatattctgaaccaactctccctcttcaaccag

SEQ ID NO: 49353 - DNA, 1596 bp, Arabidopsis thaliana columbia
taaactgatagctttggataatactgaataaaaaaaccttgtcactaatttgacgaaacatgaagaaagattataaaaaaatattaaaatctatcgaaaataattatatttatctacaaaacaatttttcccgatttagtcatttcttaacagttacaaatatccaaatcatattttataatattaaaaaaatcatattatataattcctgattttcaattttgcatattacgtcgacacttcgtcctccgggttttccgagcacaagtcctaatcaaacaataagaagacaaaaagaaaaataaaatctgaaaaagaacctttgctctttgttaatataaaaagccctactctcgcatccaacgtttcttcacctctaattcttctcactaaaaatatcaaaagctttcacattacaatatctccctctctctacacaaagctctctatgccacaagtcgatatagaagcctttgtttcttcagtatgcatcggtggctccgaccaccgcaagatcgtatgcgaaaccctcgccgacgactcaacgatcccaccttattacaacaactccgccgttagtccgagtgatttcccaccggaatcttatttcttgtcaaacgatgctcagctagagtggctcagcgacaacgccttctttgatcgtaaagactcacaaaaaggaaactctgggattctcaattctaatcccaactcgaatccaagctcgcaacggttcttactaaaatccaaagcgtcgatcatcggtttgcctaaaccgcagaaaacgtgtttcaacgaggcaaagcaacggagacacgcgggcaagaactgggtcatcttgaaacgggtcgggtcaaggataaagacggatatttcgcttctggaaccttcttctcctaaagtctcttgcatcggtagagtgagatccagaagagaacgcagccgccgtatgcaccgtcaaagatcaagtcgagtcgaactggtaaaccggttacagacaccctggtctatggcgagtttcagagctattttcagcatcaaaggcgactgcaaagacgtgtcagcgcatgagactcacacatcgacgagacacacacacgacatcaggagccgagcttcctgcggaagctgatgagaagtcggtattcgacggcggagaaccggtggtacccggtttgggtgggatgacgcgtttcgcatctggtagaagagcggatttgttgggtggtggaggatgttgacgcggcggatgacaagtgtaatacatgtggggtccagttatatagtgttttaagtcccagggggaaagtagaagaaatagtactttagttgtcttgtctgatttttttgagtggaactcgttttgaaaagtcgttggtgatgacgtggcagctgatcaacgtttttattcagaaagaaacacggcaacgcgaaagcggtgatttcacacccaccgcactgtttttgtattcttctagtttccgttgtaaatagttcagtttaaatgttattatatctgtatatgctattgtcaaacaaaatgtatttgtttctgtttacgtgttgttggaatgcgattttccttgatgagtagta

SEQ ID NO: 49354 - DNA, 462 bp, Arabidopsis thaliana columbia
gatgtatcacccaaaaatgtttgtatttgtagtccactcctatggtgatttgataatgttgaactaaaaacaatttcagcacaagaaggctgctgacagcatcctcgggggcaacaattctcgtggtcctgttagtgaaggagctggatcaccaaagtactccgagcgactgtctcctgctatcaacaattatctgtcagaggcttctcgccaagaagtcagggtgagttgctaactttatcctatatgctcgttcctctcttctactttttggtaaaaacctacatgttcagctagagtccgtaacattgctgctttcttttggtgggctcctcaaaactaagctagaatgtcctacactttttgcttattatatgttaaacctagggaacgctcaaatgccttctgaatctttactgcagctagagggaacacctgataatgggtacctgtggcagagag

SEQ ID NO: 49355 - DNA, 477 bp, Arabidopsis thaliana columbia
caaaccctaatgtcattacctaactatacatgtgtaatgtgttcaacagatcttcttaacccacattagatcaatattaaacaataaaaagattcttatatattctactacttacttcttcttattcccatccatatttttctgtgcctttaggttctcaactaatctcatttaatttagctagcacacagagaaacacacacgtatataaataatatgataacacacaaaaagactcatatatataaataattagagtcattaaatgtggattcatcattaaatgaaacaactcttcttctctgtacaatttctcttcacaccttcaccaaattctttgacttcaaaaatcttataaaatttatatatctccaaaaccataaaaccaaaacgagttttcacaaataaattacttagttgaaatttcaaatctcattcaattagggtcactctctcaacaatccacattaatgaggg

SEQ ID NO: 49356 - DNA, 524 bp, Arabidopsis thaliana columbia
aggatcccagcagactaaccaaagcggagagtaagcctcagaagatgttgttcggattcgctaaagctatcggatgggttagattggccaattacctcagagagcatcttcatctttgctgctccgccgctgcaatgttcctcgctgccgccgtctgtccttaccttgctcctgaaccttacattaagtctcttcagaacgcattcatgattgttggttttcctcttgttggagtaaggttttctatagccttctctataaagctccttgctagttttataatttagccagatgatttagtaatttagctttatggtcatcgatgttgttaggtttcagcatctctcgacgcacttatggatatagctggaggaaaagtgaacatccatgtcttgatggcacttgcgcttttgcatctgtgtttatgggaaatgctttggaaggaggattgcttctagctatgttcaatcttgctcatattggttagaacttgaccttaataaggattagggatatgcattgtt

SEQ ID NO: 49357 - DNA, 471 bp, Arabidopsis thaliana columbia
actctagccgccagtgtgatgaaaatcctaaggcatgaataatcttaaggcaggcactaatcactctcatttctaatctaagtgattagtaagcaatagttgcaagttctataagctaataataatataatcactcctaacttcagctctcattgacttgagttaagaaccattctagttctggttggtgaatttcattgaacgctgttgagcataaatttccctaagtcgtaaatccagtactatctagcagtcagtgtaccaaatcaacattcaatccatgcaaaatcctagataggaaaagaagaacagtagaagaacatgaatcttaaattagataaatagtgcgaaagaaaaaactcacatgtacagagatgagagtcaaagtgctccagtaaacatctcgccaaatgcaagcaatgaagagcatcaatccttcgttcaccaataggcacatgaagaagttgagca

SEQ ID NO: 49358 - DNA, 450 bp, Arabidopsis thaliana columbia
gttcaagaactcgtgcacaatcccaacgcgatacttctccgcttccaaactccaaacatcaagcttccaaccatccgaatacggcgaaacaagaggaaacgtattcaacaaattcagcttcctcgtatccttctcttccaactccaactccttcccatgcttcaccggaaacttaaacacccgtttcgccttatcttcgtcaatcataaacagtctctcgagctcacttaccgcaagattcgtgtcccaattcactaactcaagcactctattcccatctccacccgtaacaacccgagaataatccggatatttcgcgacccggtctcgaaaatcttcaggaataccgaatagcaatcgagtgtgatggattttactcaacaggattcgtttatctttcgtcatcatgaatagcttacgaacacaagtatctctatctaactccattga

SEQ ID NO: 49359 - DNA, 490 bp, Arabidopsis thaliana columbia
gagtcttgtctttccacatctcatatggagttttatcactcttcttgtgaggaaatttattcaagattgaattagccgtgagaatggcttcacccccataggttaggtggtgcacccgaatcgtttaacatgaaattcatcatctctttaagagttatatttttcctttcggcaactccgttttgcatcggagtgtaaggtgccatagtttgatggatgattccatgtgtggaacaaaaatctgagaattcatttgatttgtattctccgccacgatctgattgggcaatttttattctcttatctaattgattttcaacttttgctttgaatttcttaaacatattcaaagcatcttccacgggtttggcttttgtgttttgcttgagggcaaacaaaaactatgtctggaggagttaatataccctatttttactgtttttaactatactctagatataggtttttgactatgtttttgaaactatag

SEQ ID NO: 49360 - DNA, 499 bp, Arabidopsis thaliana columbia
ctcttgtccatcatggtcgtcattaatcgttaatctcttcaaagaagggacctcatcaatagtgaaaacctcaatatcagaatcttcacctcgaatcacaagcaattcttcaagaatagggcagcctgataaaaggttacggatagatgattcgtctttgtagctcacaagctcaagatggagagtcctaagagacttcattactaccggagaagagatatcaacaagaatcaaaagtacgagtctcaaagtctcaagtgtgttgcaagtacacaagctactcggaaatttgaaagccgtccccgtcccggtatcagcagcaacgagcaccaattcacgcagatgtctagaaaacgcaattccaacccaaagtccaatatctacaggatcaactttttctgattcaaactcaagacgaaagctctctagaaccggggctttatgtgaaaggaaagatttgcaaactatctctgaaaatgtatactgttctttgtcgtcg

SEQ ID NO: 49361 - DNA, 329 bp, Arabidopsis thaliana columbia
tagtaacggccgcccgccagacttctcaccatacactttggggattggcacatttcctccggttctggtagatgcatcctcccttgtagtctcttccgcttcacggagtctgtcaggtccatcgatgtcttcatcctcgcgcaaccactcaccttacgcttcgcagtcaacagatcagccatggggacagacaatagacactaagccctctcttgacatagctgcagaaccagagacgccctcacccgctgtcagaatgctcacattgcctgtagaacgatctcagtccaatcattccagcattagcagtcagaggtaaatcagtgatg

SEQ ID NO: 49362 - DNA, 512 bp, Arabidopsis thaliana columbia
cttcttctgtagccgtatattctcgcattacttcagttcatgcagacaatttcagaaccagaagaagcttcttacgaagacaatacaagttacaacaacgaccgtttaagaacactagtagataaaatatcactaactaaatcatcaaccaaagcagaaacaatctctccttccatgtctattccttcctcaaacatctctctttcataaccaatccatctcccttcaaaacagctcatgtcatgatccacaagctcgtcgatcatcatctctctcatcttcttcaacccttttacttctctgttcacttcttcagccaacaaatctctatgttccaacaaaatcccacctgacatcatcatccctttgcagcttccaattaacatcctttcaaatttcaccgctaagcactgattcacacagtcgaaaagcgcctttctttctgtcttcattgacgttgcagctcctcgagagcgttccatttcatcaaagaggctggagggtagtaatga

SEQ ID NO: 49363 - DNA, 556 bp, Arabidopsis thaliana columbia
cttccttctactattaccaacctctctacgacagcttcggtgttaatgcaatgtgggctgttatgacggttgttgtcgtcttcgagttctctgttggtccgtcttcgtatatattttaagcattttattattatttagaatttatccttcatgatcctcgacatcggtcaaaccaaatttaggttctggataattactaggtcttgcatgcatgccatgcaatgcaatacgtacattttcaaagaaacgaagtttgaataccaacatgatcacttgttgtagttaaagattttattttatgttttgttaataattgttataataaaattggatggtgtgtgtgcgtgactacgggtatatatatgtaggggccacgcttggtaaaggacttaacagagtggcggcaacactatttgcggggggacttggaatcggagctcatcacctggccagcatgtctggtccgacaggagaacccattcttctcgcagtctttgtctttgtacaaggtaaattatatttatatacgaattaagttttgcatgtatagggacta

SEQ ID NO: 49364 - DNA, 504 bp, Arabidopsis thaliana columbia
gttgagcgtatccaagaatcattgcgttccaagctactgtgctgtgtttggaggaaatctgttggaagcattttcgtgcactctcgattatgccacattttgagtacatcacgatcagagaactgattacaaactcgtttgatacgaagcctgatttagtggcgagcgcgtggatctgctgacctaattggagtgttgctaggtccgagcatgatctgagaagtgcagagaaggcgtaatcgtcgacttttatctctgaggatcttaagtagctaaagaactttaccgcatcctcgctgagacccttctgggcgaaccctgtaatgatcgaattccaagagataagatccttagattttaaggattcaaatagagacagagcatcttccatggtgcctgtaggaaactgaatatacatagagatcaatgcatttgttgcagaagttacttgttccaatcccttctttattaccataccatgcaaagacttccaaaaatttgatg

SEQ ID NO: 49365 - DNA, 495 bp, Arabidopsis thaliana columbia
aggcttacctgcacaagtgtccggaagagaagagaagaggacacacagaaaacgaagctagacttggaagagctcgaaccacgtagccaagagagaagtccgaagaggtccagaaggtctatcacgacagatgggatcaagccaagcacggattgtctgctggatttccttgaggagatgagaaggagttcttgagttgtttgaatgaatccttgaattacgctctctccaaatcagataaacacaagcttgaaagatcagcttgatgataagagaaaggttctttgacgtagaagccgacttcagccatagaaggatggaatggaagtgatttggaggagtcatgcctgctcttatagttaagaaactccaaatttcctcattgaactggcattgaaagaaaagatgattatgtgattcatccaacacattgcataacacacagacagacggaatgttgagtcccaccttgtcatctatcacgagtatgcagac

SEQ ID NO: 49366 - DNA, 500 bp, Arabidopsis thaliana columbia
tgggaaataataatgtttgccaatgaagccgaatgttaaacattttggtgttctaatctacacatggttttgctgagtaatcgtggataagacaaaagacacatcgacctctggaatagtcgtctgtatcttgccacacagattcagaatgtttgagagaatatagacaaagatgatacaacagtgagagattacttgggcaagtctagttgagatgagaaaaacgaaggatcgcggtcagaagcatcctctctagttgtcgtagatctgtcgtagttatcactaatgtccttgatatcatctaagtttcgtgttggcaaaggaagcttcctagggctatcccttttaatgagcttgcctcccatctctgtatcgtatctcacggaggaggtatactctgactcatactcggaatcgttagatgctatagtcatgtcatcttcttcagggaccattgctctgagatctagttgcgaaggcgggatcttggcaaatagtac

SEQ ID NO: 49367 - DNA, 520 bp, Arabidopsis thaliana columbia
gtttctgtagatggacggcagtgagattgtgtgtgagggtccaagatgcagtcttcgtagtaaaaaggtaaaaactcttaattgttcggatagctcatatattctttggacattacagaacataacattagattcattgtttgggacaaactctagagatgttatagacttgtggacctccttgattatgcaggtttatagtgatcttgccattgattacttcaaaatgttcttgttgaatgtaccagcaactgttgttgctctcggactgtgagtacctccggttctgttcctctctcaactttcaaatcacatgatcttagcttatgttagttagtttaaaattgttgttttcttcaattgttctccagatttttctttcttgatgacattactggttttgaaatcacgtacctgctcgaggtaaaacctctttcgactattctactatggtttggagaatatatactcgtagtaattgttccagtattcatgcaactgattaaaaaacaaaaacaaa

SEQ ID NO: 49368 - DNA, 697 bp, Arabidopsis thaliana
gatccagaagttcatctgggacagctcaagaggttttctttgcgggagtacaagtggcgagtgatgggtttagtaacaagaacattttgggcagaggtgggtttgggaaagtctacaagggacgcttggcagacggaactcttgttgctgtcaagagactgaaggaagagcgaactccaggtggagagctccagtttcaaacagaagtagagatgataagtatggcagttcatcgaaacctgttgagattacgaggtttctgtatgacaccgaccgagagattgcttgtgtatccttacatggccaatggaagtgttgcttcgtgtctcagaggtaaaaactaaacatcttgtgctctctctcaattactttgacgtgaagtgttttttcatgttttcctttatgggttcataattgttggttacactaatgacacagagaggccaccgtcacaacctccgcttgattggccaacgcggaagagaatcgcgctaggctcagctcgaggtttgtcttacctacatgatcactgcgatccgaagatcattcaccgtgacgtaaaagcagcaaacatcctcttagacgaagaattcgaagcggttgttggagatttcgggttggcaaagctaatggactataaagacactcacgtgacaacagcagtccgtggcaccatcggtcacatcgctccagaata

SEQ ID NO: 49369 - DNA, 545 bp, Arabidopsis thaliana columbia
gaggttatagttgcattgcatgtgacgtgatcattcattgtgtagggccctgacattgttgttgccgatgtggacaccactattggtgataaagatatttcagaggttagaagttatgtttttagaggactaacttttttgttaactataaactttgctcgttcaattttccgatttaaaaatttgcattgattgtgtagacctcgaacaatgctgttgccgatgacgacaccactactggtggaaaagacaattcagaggtaagtagtctaggtattagtgttttttttttgtgaacgagcaagattttccttattttgcgtgataacaaaaattggttttgtaggcccctcaccttgctgctgccgatgtcaacaccactattggtgataaagataattcagaggttagtagttagagttcagcgtgctaacgctgttggtaacgataaaccctttacgttcagcgtcctgacaacaataatcacgtggtggttgtaggtcctatcattgtgtttgcaatgttagaaactagattagtagtga

SEQ ID NO: 49370 - DNA, 496 bp, Arabidopsis thaliana columbia
ttaccggagacgagtcttctggtccaacagtagcactgaacaagtctccagcaacagttttttccggaatagacttaatagccgctgcattttctcttctagttgtttttgtttgtgtatacttggaggaagatgaaggagatccacttgcttggctctggttaccatcagtcggcaatgtcccggccacaccatcagatttctgcagcatatacattatgggtcatgtctaatgccgaaacagtctaatcactctttatgtttttggattgtgtcatttttatatatcagaacacaatgactaactccatctataaatatcgatacaacagagggatcaacgaagattagaacttactttcagttttagccagccaagcattccacgagtcttgttctttctcctgtcctttgtcatctcgtccagactactattgccatctcttggctcctttaaatgttcagaaactgtgcttacagaccatcatcagccatg

SEQ ID NO: 49371 - DNA, 532 bp, Arabidopsis thaliana
gtctaacttccatatagttgatgatgagaacccggaatgctttgctaatggtggttgtggggtttcatcattcaacgattcatttaatgcagtccagtaaccggatttgactatgtaatttctctcttttgcagggctccataagtatgtgtcttctgttgggtactaaggtagatagtttttgtagacgagatgatgatcgtccggttcaatgagttgagtgattttagtctcatcccattggcgagagataggatcaatgatggcctcaaccttagtatcgacatcaacgtgaggtaacactttgggcgctcgaggtggtacggatggtaaccatggatcggttcccaacatggtcttcttaccatcaccaatgcttatttgtatgttagttcgtaacagatcgcgaccgaaacggagagagttcaaccataggagggttgtgagcctcgtgtcgcgtcaaggagagagctatcccggaagtatctagctttgagtaccgataaattaagctagtaggacgttgaaccat

SEQ ID NO: 49372 - DNA, 445 bp, Arabidopsis thaliana columbia
aatcccccataagcttcactctcttcatcacaacaacacttctcgggtcctgcaacgcatctgcaaaggccaaaacgcaaccgctattcccagcgattctaatctttggtgattcaacagtcgacacaggcaacaataattacccttcacaaacaatcttcagagctaaacatgttccttacggaattgatctcccaaaccactcacctaacggaagattctcaaacgggaaaattttctccgacataatcgcaaccaaactcaacatcaaacagtttgttcctcctttcttacaaccaaatctcaccgaccaagaaattgtaaccggagtctgtttcgcatcagcaggtgccggttacgatgaccaaaccagtctcacgacacaagcgattcgtgtctcggaacaaccaaatatgttcaagagttacattgctcgtcttaagag

SEQ ID NO: 49373 - DNA, 493 bp, Arabidopsis thaliana columbia
cgaaacaaaacatttttgagtgtgtttgacttcttctttgatcatccatcgtcatttaactagttcttgagttttagagacttacagttgtggtcagcccatccaatgacctcattctccaaatcgtatactactaacttgtttgaaagcaccaaatctatagatgaagaaaccaaatctcaagtcagacacatgaagtgtaatacatggtttagtagtatgatatgaattttacctcccaaaaggattacatcagctccgtcctgagtcgtcattccaccagattgccaaccaaagcaatacatgtcttcctgtttaagaaaatcattacattgtgcatgagacaattcatgaaggttgacaataacaccatctataactatgttgttcaaatctattgatcaaaactcagttaaagtaggaatattctgttgaactaaacacatcaaagtaggaagcgactgacttacacgaagtgagaaaagatagtcat

SEQ ID NO: 49374 - DNA, 814 bp, Arabidopsis thaliana
tgaaataataaatgcatgagagatggtgcagaatttgcaacataggaactttgacttggcaatggttgttgctggagaaagctattctcatacagaaccggcttcgattcaaggacctctggaacatcattccaaggaagcagagagtcaaacgcagaggaggaaatgggaggatcaaatcctatacgcgtcttttttgttttcggaggcatgatcacatcggtgttgaggtcagacaaagaagctgaagcaagtggctttggatcaatctctgttgctttttggatcagagaatttcctccagagaatacatagctgctcctcccagggctttggtagcctgaattcacttcgacatcttttggagatgaatccgcattcttcacgccacctgaataacacttgagctcctttcctttctctaatctgctcaggtaaagtctatatttctacaaaaacagaacaaaaaaaaagtgacgaaaagcttaatctaacacttgttctgaataatgatgatgacaaggtaaagtttttacctgaaggtggcttgcaacattttctctagtgagccatggaacattcatgagatccaatatcttcttgggaccagcttctgccaaacaagagaccggaaaaaatttcacggctctatgaagacatgataataaagggaggcaaggggacatgataagaaaccaaagtcgccaacgtacttactgtgatcgcatccgatttggttaacggcgttgacaaacttatgatgaagctcaaaagaccaaacaactctagctttcttggaagaagaagatgatgg

SEQ ID NO: 49375 - DNA, 543 bp, Arabidopsis thaliana columbia
aagaaacacatttgttaaggtacataatattaaatgttcatagttatagagtccagatttcaacttaaaaatgttaattggtaggtaagtgttttttctactttgaccaaaaagaaaaggaataaaaaagtgtatctactttctatatattattttcaaagaaaacaataacaaaaaacttcaccgcctttctcaaagcctcctatataataatatcctctggtttctcttctaggcttaaagacaccaacttctcgattctcagagctcttccaaatccctgtgaaatcggattcgagtaatactctcggaaccttctggtacgtgacgaacctagggtttaagatcgcacacttttctcttcacatgtctcgatttcgtactcttctttagtctttcgctgatttctcgtgtttttgtcactgtatcgcaatatctgctcgagggttacgcccgtttctgtatgaacgatttagggttacgttggcttctctctgtgctttgttgatctctgcgaatacttgatttgattgatgtgtcaaa

SEQ ID NO: 49376 - DNA, 495 bp, Arabidopsis thaliana columbia
gtctcaattaatacgttagtgtaagtatcaataaagaatcagcccaccaataagctatgagaagccaaagcgtttcccattcctcgagttctcgttatcattcaaacctatttgatgcttttaaagcaaaattgaccctacgttttccgaacgtgtttacttataaagcaaaagtgcaaaagtgcgcagacatggagacactcgggtgcaagatattgaggaagagttgaaagacatgaagcaaaagtgcgcagacatggaggctctgctggaattcttaagatgatgttgtttgatgacttgaggcagttaagagtttggatctaattgatgttctagtctgtttgtttttagttttagttttgaaaacagagtcctcttactctttggtgtagaacatcgagagacttgttctcattgaggtatcctatgtgtcggtattgcacttggtcctattcatgtagatgatgaatcgtgattagagacaatgaagct

SEQ ID NO: 49377 - DNA, 594 bp, Arabidopsis thaliana columbia
cattatcgaaaccaaagatctaaagtcaacgagatcaagaatctaagctccccaacccccaaatctacagacattacacaaaaacccatcgaagaaaaaaacaatcaattccacacaatgcacacaacccacttaaaaaacacaagacatgatccagattcaatgatcaaaacaccaaaatctaaacaatgtatcaaccccagaatcaaaaatcgtcaccttatacggcgatcgcggcactttcctgggagctttaacaggaccactatgagaaacaccaggagaatcatcatcaacaccaaaaggagaaaacgaattcaaagaccgatgagtctccgtcttaaacctaaaaatattcctggaagaagaaaacccagtaatatctctcttctccggcgtctcaggaccaaacatcgccgcacgcaacagagtagcgtaagagccagctccatcttccttaccatctttactaggagaaggagatagatcgaaaagagcgaaattggatccggatctactggggataaatctatcagagtatatagaccttgatagtgatgatggtgatggtgattgagattgattagcattgat

SEQ ID NO: 49378 - DNA, 1715 bp, Arabidopsis thaliana
gtaacggccgccagtccgtgctttaaagttttatcactttatgggaacggctttttgcacaaaggccatagaagaagaaaattaacttagaaggacacattttttctatcaacgaggcttatgtattttggtttgatgaatgtgtttggacactacacatattgaccaaaaagagattccaataatattttgtaaatttaatttatagtttccaaaatatttcatggaattccaaattcacatcgatttcaatatctacactgagaatttttataagaaacgtatcattctctcggtgcttactaaggaagtaaataaatacagcgagtatgtagttaatgcccggacaatgaaattccgcaatcaatctcgagggttaataaggcaaaataaaatttctgctgattctcataattaccttaaatataaaaattctatcaaaaaaccataacaccaacgttccatattcttctataaataaatcattcttcttttcactaaaattgctaattaactcggagagaaaacaaaagcatgaaccgatcaataacttttgttgtgttactggcggttcttgtctccgtggctaaccttggcttggctcatgtcggtcttacaaatatcgacccttcgtggtacgacgcacatgcgacgttttacggtgacatgagcggcggagaaaccatgcgttagtaattttgagtatttgattataatgagttttactaatcgtgtcttacaagtgatagtagtaatatttagaattgctatatgcttatgatgttttcgcacgtcgagccatatttttcttcttctaaaacacgttacggtttattataactttataagtaacaaaaacattcagtcacaactagtaaaattacatttttctagtttatttaaacatttggttgatccgtaatgtcacctattgaaacaacaagttttgttttgtttttaatatttggtgtggcagaaggagcatgtggttacggagatctattcaaacaaggttacggcttagagacagctgcactaagcactgctcttttcaacaatggccagacttgtggtgcttgtttcgagctcatgtgtgttagctcaaagtggtgcaaaccaaacgctggttcaatcaaaatcacagccactaatttttgcccaccaaattatcaagaaccggttcagtaccattggtgcaaccctcctaacaagcactttgatctatcaatgaaaatgttttcactacggtggctgagtaccgagcagggatagttccggtgaagttccggcgagtggcctgtcataagagaggtggtgttaggtttgagattaagggcaatccttattatatcatggttttggtttataacgttggaggggcaggagatgtgagtaacgttgaaattagagggcaaaagagtaattggatcgttatgaagagaaattgggggcaaatttgggataccggtttagatttggttggacaaagtctctcgtttatagttcggaccagcgatggtaggagcatgacgttctttaatgttgcgcctccgaattggggtttcggtcaaacttacgaagcaaaatcgaatttttagatgtttttattttattttattttattttagaaaactttagtttctagagtttttatgttggaagctattatttaatttcatcataataataaaaatatttttaaaatttttagttac

SEQ ID NO: 49379 - DNA, 355 bp, Arabidopsis thaliana columbia
tgttcttggtcgattcagaagctgaatctttgttggatcatgaaatcagaaaccataagtcgtctaaggagcaaattacacaagactacaagaatcttacttcaaaggcacgtaacaaacataaaaacctaactatataaattgtgactaatacttagaggtaattaacattacaaaagatgtgatgattctttcagaggagtgaagaattagaagagaacagcgatgagtattcaccgcgattactaaccccgccgagactcgagacactatctccattgccaagcttcacagttcgtcccgccccactcggagatagactcactgcgcttctgcaactggtttctccatttgg

SEQ ID NO: 49380 - DNA, 442 bp, Arabidopsis thaliana columbia
cgtcaataagtatagaactcagccaactcctcgacggatcctctttcgcgatcatcctcatcgccgtgatcagaggaactgtttttgagcatccataacaagtgctcgaacaatacgacttcgcaagctactaagacggtctcttggtcgtgacgttcttcgataaatctagacgaccggtcaagtagttcttgcaaaagcggatgagcgatgacgtgggaactaagcatgtaaggtcttcgtgactttccgacgtaaaccacatggagatccgcgcactttgagacctcagatacggcggtagaagcggtacacatggttgaatggtggttcatggtcaaggaaggccagttctttatggcagacttgagctttgtctagtctaccgaatataggcattagcgaaagtcgctgatttttagcaatagtagtagtttcttga

SEQ ID NO: 49381 - DNA, 469 bp, Arabidopsis thaliana columbia
  unsure (1)..(469): unsure at all n locations
nnnnnnnnnnnnnnnnnnnnnnctaaaggcaaaacatgctagatagagtcagcttttacggactgatggtaacgattgcaaatcggctttaaacgaggcaggcaacaaagacttggaaaattgttcatctctaacgtctgcgtgagttgaaaagggtaactgctntagataccgcgcggtagctangtgtgtatttcgataatcaaagtgcacttgtcaangaacgagctcatgccctttgtcgtaaaagtcaaaagagcggggaaacgttttgacttgtagacgtcatggagctgaaatggtgcctatgtggataacaagagtgacagaggaggtcaacctgtgtagatgantgacatgaaattggacgcacttgtttagttgttgagccaaaggtaacgacttacacctccttgagcagaggcatttgntggtatgttaaaaaatccanctcgactttatggaaaag

SEQ ID NO: 49382 - DNA, 417 bp, Arabidopsis thaliana columbia
gcaaatgtagcatgtaatttacctacttgctccagcagtattttctatagatcctattgtaatctgttgtggaaatagatttgcattttcagttcttgtggtggtcattacttattttgggttgtgatttctggccaggaataagattgagattgtgaaagccggtgccgttccacctctcatacagattctgaagctccacaatgctagtttgcgtgaattggccactgcagcaattctaacactttcagctgcaccagccaacaaggcgatgattataagttctggagttccaccgcttctgattcagatgcttagctccggaactgtacaagggatagtagatgctgtcacagcccttcataatttatcagcttgcaaagagtactctgctccaattcttgatgctaaagctgt

SEQ ID NO: 49383 - DNA, 218 bp, Arabidopsis thaliana columbia
tgtaataaacaaagtaaataaaaccaaaataagcataggaaatagaatagtattgtcagattcatgcggataatagaaagttcttgtattaagtccaaaattttcaacagtaataaaaatttgatttcttacattattacttattttatatgttttattgcaaaacaaagaagctctttttgtagtattcattgttaataatggtactaaccctaaat

SEQ ID NO: 49384 - DNA, 1046 bp, Arabidopsis thaliana columbia
catttgtgtctcttggtgattcaatatcagagtcatcagcaacaaatccctacaaagaatgttttcagcaatcatgaaataactattttgtccaacctttcttcttagctgccaaaaattgccgactctggttcatcgaaaaatagcactggaaaaggaaaaatatacagtagctacacctaaaaacatattccaaattcctgaattatacttccctaacttaaaggcattttggtatatcatcaactatacaaataaatgtttcatgtaaacttggatggatgcatgagtatattgaagggagagatactggccaaaggagaaattaccttgtattcatagagatcgctgcctgtgcaaccgctgctctcactcatttttccactcaatgcacggtcattatcgtcatcagtcactggttcaacttcattatctgcattgtgatatccatttttcatgttgttgtcatcatcacttgaatcatcaggcccactatttccaatatgtgattcagttgatatagaacatctttgaatattttcttcctgaaattgcaaataagcatataagacatacaccattgatgaaggttgaatgaaactatcagagtgcgtcttacatcgaaaatacttccataatcctccagaagaactgtaatgatggcttgagcattgttggcagcattagcagcagcaagaagctgagcagaattgtcttcaccaccatcaaaatcgtcctctaaatcacattcaccagccagaagaggacgtaggagcagaggagccatgcaagcagctacagcatttgggttcattcgattttcgtgggaatgagacgagatagtatgcatcattttcagaattctgagggtacaaagaaaatatgtaagggtgtaagaaaacaccttataaatctcgagcactcttactcataaaaagacacaaggaattcatctggccgatagacgcagacttggtagaaacaagtaatctcaactttaacacctaatatttaatctaatctataaactgttagcaatgtgaaca

SEQ ID NO: 49385 - DNA, 164 bp, Arabidopsis thaliana columbia
taaaaaaaaaacaaataacccatcttttctgtgaaggaacattaaatcattgtggagagaattcaacagagaccatgtgcttttggtacgagcacgccacaactgaattgaaaacaaaaacctaaatcgagtagacatggaatcataaagtacacctactggtt

SEQ ID NO: 49386 - DNA, 549 bp, Arabidopsis thaliana columbia
tgaaaaggttggatcaaatgagacaatcggaatgaacattgtctacatatattacaagtcggttgtgcatgaacattgcgtaaaaatggttcaaaatctcggattattagattagacgtcaattaaatgcttgaaaatctcaccttatcggaaaactattattttctcttataaaaatgcagttgtagcaatcaaatttttagaacaattttctcttataacatagatttttataaacgatattcagaggccaacctttataggcgccccttttcaatatttttctattatttccatgcatcgggtgagtctttttctagtttatatatatcttgccaaatgtttgtattataaaaccgtctcattttaaagccacgaagccaacatggcaaaataaaaaagaaccaccccgaatcaagagaaaggaaaatttggagcccagtaaatactgattaggtcgtgctcgtgaagagaaatgaattagtggcagagcattaggcaccaagtggcttactaatatgagtctacttagcaattttgttattaaat

SEQ ID NO: 49387 - DNA, 614 bp, Arabidopsis thaliana
cataaattaaattgcaaagctaaacaaagattatagtgattaaaaagctacttgtaaatctcatcagaagcatatttacccaagaccaaggtcaaagacaaggacttttagccacgaattttcctttttcacttgctataattatgggggaaaaaaagacagaagaaagtagttgcttacgttttcactggctaatttgatacagttctgaaacaactcgagaatttgctgtttgtcgaaacaaggatcagactccgtctcaggctgagacccacgagcgaaaatgacagacctacgacggctagcagcggctcttgcggctcgagcttgttcccgttccaatctgtcatcgttagatcccaagaagaagggactcgtcggagcctggattcgagtcgtcgttgaagctggcttttgcttagggtttggagttaaggattcatccatgacagaacttctccgcttgtataaactcaatgagagaaaatgcgtttgttgggtcaccggagctttgtggatcgagaaaatcaaaataatttgggaattagggattttaatatgttgatttccctcttctttacccttttgaattttagagacactgatgagaatgt

SEQ ID NO: 49388 - DNA, 518 bp, Arabidopsis thaliana columbia
ttttcttgtttaaaacggcaattttcaatgtatttacacatttagatatttctcttttctctattttgactgttttacctttgcttacctttctatttaccaaataacgcaatccgacaacattggtgtgttttcaccgccggagcagctctgttcagattcttcttgttttgttgaaatcagaagaaattagcagcaaaggccagacttgaaagtactaaattacccatcaaaatcaacatttcaaaccttcaccaaatatttgtttaatttttgtctgggttggctatatactatcctttcgggtttagtttcttccatcattgagagtttgtaaaagaaaatggttgtttgggataagagattttaataaagcaaggaaaaaaaatcaggaagatggacgacaaagaagcaacgaagaagatgaaggaggaagagaattagagaagatgtacacaaaggaaaaatcgtcaaatatttaggtgaaaagtactcaaatccgtaagcccccaaaaagt

SEQ ID NO: 49389 - DNA, 530 bp, Arabidopsis thaliana columbia
ggtgttgagtgacttacgtcttgcaacaggcctttggtacagagctgaaccatctggaactttggcaattgtcatgctagcaactgtatgcaaatataagagatggatttatacacaaggcggtcctgatcggattttgcaaaaggatgaggtaaaaacttcgcacttgttctgagcctactcgaaatcttccttgtactgtaaagtgaactaacaaagaccataaaaagagaaccttaaatgaacatggattagggagctttgtctcacttggaatggctacaagcaagttttgtggttgtttttaaggtgttgaagttatgagattggtttgggagccgagagttgcaagtcttcagtaaagcctgagatattcgcttaatggtccagtttcttaagttttggaggttagttttgtcatcactgctatggtataagcgtctcaaattaaactcttctgtgatagggaaaataagttaaccagatcatttagcctctgaaaatatcaaattctatgaatgttgattata

SEQ ID NO: 49390 - DNA, 371 bp, Arabidopsis thaliana columbia
acggtacacgaataagacaggacaggacgagtttggtttcaagtacatttgtatttgacctagctatctttctccattaatcgtgctagctaccttgtcctgcggctgaagaagtaacgcgagacactttttcctgttttgtaaaaattatattatatcatttgactagtgtaagttaaatgtcaattctacaacgtgcatgtaaaacatgaaggaaaaattagtagaataaataaaaacagaaaacaaatagtagaatagtgttaaattagagtgaatttgtgaaataatactttttaaagaaattgtaaaattaagtcttttaaagtaaaatgctactgttttatgaatattatttaataatttagaga

SEQ ID NO: 49391 - DNA, 579 bp, Arabidopsis thaliana columbia
tgaaactttcttttctcttaattagaataatttggatgaaaaaggacaccaatgatcctaaccgttgaaacatatattcaacctcttatatgatatactacattttgtcctccatatacagttaaaacttaaaatagtagagaacccatacacctttcttatgttatttttcatcaaatatatacagtgttcattacagaaaaagaaaaagaagaaaaagggaactcgaagacaaaatcagaactctatgtactaattttagaaactctaactacagtttaaaataatattttacatgaccaagaatgaatattcttctttatgagcagtatgcgaaatactcaaaagcaagttgtagtaacttatgaatttttattgaaaatgtcttaattttactagaaaattgaaatttcttttgaaatttcgtgtacctttaataaactaaacaggtttacgtcataacattctatataaaaggacactattctcgcctcatttgggtatcaattcagtttttttttttttaacatttaagaagaaataatgaatccttttgacgttgtcattattatagtatgt

SEQ ID NO: 49392 - DNA, 478 bp, Arabidopsis thaliana columbia
gtgatataggatttgaaaagctagggtggatagagtttattgaaagtctcagttttgattgtctatctagcttaactaggttttgctataggcatataataatggctgtgaaagactatctttgagatggttactggtggatttttttcaattgctgttgtgtgtcttagatactaatgctgcaccacatttgtgcagatttgcaagttttttatgcagcagaggtgtcggtttggcagttcttgtcgttcatcacatggtatgtttaaagcatagttagatgatcataatatttatcattatcgtattgtgtgttatatattcataccgtgaccacatttagaactttagacgttatacatgtggctggtttgtcattgtggttgataactgcaagacatcgatcggtgcaggactagatgtgccgatatcgtctctgaagaactatgaacagactgagtggaagcaattgatggta

SEQ ID NO: 49393 - DNA, 565 bp, Arabidopsis thaliana columbia
tatgtatatatattggaaagaaaaagaacactagaaagagaaaaacaaatatagttagagagatcaaatttgtatgtattgacttaaaattaggctaagtagaccaagttgatcatttcagaataatgtctctttagattctattttatgacttaagcatgtgttttacttgccttatagatgacctgaacatgttaagaaactatttctcatatatttagggttttgtacatcaacatatttatataagaataagagacgagactctagtttttttcaattaagacattacctaaaacagagtaatcaaatattatgagataaatgtgaatcgtaatcgtatcactaacacgccccctcaagatggagaggcttgtgacactccaatcatcaacacatctgctaattggtcctttgtgttgatatgaactactcggagagcaccttgttgaacttaaccacggatgaaatgataatctatagcaatatgcttcatctttgagtgtaaaccggattagcaccaaggaagatatttttgacgttgtcgcagtcacaacaagtggtg

SEQ ID NO: 49394 - DNA, 467 bp, Arabidopsis thaliana columbia
gagtatgtagttgtcaacaaagaagattattggttacctttagcttagaatcgctagagaagacgcagctggatgtgatagcatggcctggctcaaagacccatcctactgaaaatactctttcgcggtctttgccttgttggagtgagcaccacagctcttgcggaacgaataaaagatcattttcttctctcacaatctcaatcaccttctcgccagtaacttgttgtatacaaccctgaacatactcacaaaataaacaaacttacggcaatcatcgaatggaagtacacacttgaatacacagtgtaaggacgcgaactcacgaaatcagaggcgtgaaagctagtggtagcaagtagaactctccaagaaccggtaaccactgaagctgcagtggtaggtgtagcagcaaagccggagctacggatggcacagcgtccaagctgatcgccatctctgaacgg

SEQ ID NO: 49395 - DNA, 254 bp, Arabidopsis thaliana columbia
tgctgcataacacataatttaaaaaccctaagaaaaaaatcggaagtttgtggaagcaagaagaagaaatgatgaatccagaatccgatcatccttcatctcctcgtcaacgtaagattggaatcgccgtggagctctctgaagaaagtgccttcactgttcgttgggctgttgataactacatccgtcagggagacgacatcattattctacacgtctctccaaccgccggtctctttggagccgattgggga

SEQ ID NO: 49396 - DNA, 502 bp, Arabidopsis thaliana columbia
taatgatataattaaagagttggatttatttataattaaattttcactactcgtcgtttacctaattcactatacagtacgtttatacagtatatttatctgagatagtgggtagcatagccgcatagggcaactaggaattaccaaattaggaaaagcttggttagcaaaatatattggtttgtaaaacctaacatagtaacatgacccgactttaaaaaacttaatttggtgaactaaaaaaacaatattcaattttaagttgacttatttagccaattgtgcccgggaaagaaaatgtttcgatttcgacacctgaactagaatagtttgcttttagaacaatctgaaatctgcaaataattggaaaaaaaaatatagatatcaaacctgaagataatggcgaggatgaaggtaagagcaggagtgatattgctaatggcagaggctaaggttgggctgctgtattcgatgcctatgtatcctgtgatcacatacattg

SEQ ID NO: 49397 - DNA, 602 bp, Arabidopsis thaliana columbia
  unsure (1)..(602): unsure at all n locations
tggnnnnnnnnnnnnnnnnnnnnnnnnnnnnnnnctaaagatagtaattagcctatgccggtgacgcagtgtgagaacgtatttcccggggaagtctccggagcaaaacctaagcatgtcagagtagggcgtcatcggcaatttgcggcgaaagatcatctaacaaggatggcacccataaccaggtaaagatatagaggcagctttcgcctactatatagatattcgtattttccttgttcttggttgagtattaagagatcctctattgaagtgccaggtgcgactttgtgtatgaactgtcatattccttatcaaaatttcacagtggttgcagcaaaacaagttctttgcgcgagtctgttggtaccgtatattgcgtccaggcagatttcgcttatccagacatcgttttcactgcggatcagattgagacgctcaggaccaacgccttgtcaggttagtgctcgtcatgtatcacatcttaggatcaagtcgaagggaaactaaactatgagcataggtaatgagccatggcgctcttcttatagtgctctcagatcgaatgcgcgtgctctgcagtataagatcgacggaggcgc

SEQ ID NO: 49398 - DNA, 684 bp, Arabidopsis thaliana
caatgctattgccacctgcttcaatcaaaaccatcaagattaaccaatggaaatctgacctaccgatttctaaaagacaaaatcacttgcaacaactgatatgtacattgtaaaagcctaaaattacataatctgcaacttaactctttcaccaataacacaacgtcacaacctatgtagatgtgacattggaagctaaaatcgcacaaaggatagagagacctgaataatgggaagagaaggaaggttgagatcatgacggaggttcttaatcaaacgatccatattgttcccgtagctctcggcgtcatggatgtccaacacgtcactctctccttgataccacaacaccgccttgatctctccgccgcatttcctactctcctccgttctcttgaccatcctctcgtacaagtggcttccacgctcccactcttttatcgccgttccaccggaagcgcacggcaccaacccgatcacagccgaatctgtttccaggcgattcttcacgcattacgaacgccattcctggacctactccacacactttacctgtgtcaatgtcaacgtgtagtggctcgtgtgcttcttccaccggagatctgcggacaggcggaggatcgatgagtttggtgcgcattccggtggaaggattttatccacacccagcgattgttgtggtgg

SEQ ID NO: 49399 - DNA, 456 bp, Arabidopsis thaliana columbia
acatctctacacttgcaatcactcagagagtgtagataagacatgctccaattttgcttgcagtggagagaactactatcgtccgatttatctacctgtagagtctgtgattaacattctcttctcatctggaactacaggtaaaaataatgtgatcatcaaattgtaatagattttgtttagatgcatctaatgattagttcttttttcttaaccaggtgagccgaaagctataccgtggacacaactatcaccaattcgtagtgcttgtgatggatgggctcatcttgatgtccaagtgggtcacacatattgttggcctacaaatcttggatgggtaatgggaccaactcttatgttctcctgctttctaactggtgcaactctcgctctctacagcgggtcccccttggccgcggttttggaaagtttgttcaggcaagacatctccattgt

SEQ ID NO: 49400 - DNA, 302 bp, Arabidopsis thaliana columbia
agttaacacagtctcttggatgatagctcgatttaaaatgccttaaagagaggttctcaatcagggcggaactagcaagataacgtcatgcaccggattatgtagacaagtcctagctctcagcctagaggtcgcatagcccaaatcatagagttgagcggaagattctcaagccgatcggatctagtaagatagacgttcatcgatgaagatgtcgggccctaatccaatacaccggagagacgagagatgagatggagggaataaaggacgcacgactcacatttgccatgcggagtgga

SEQ ID NO: 49401 - DNA, 560 bp, Arabidopsis thaliana
gggtaccgacagcgtgctctaaatcgtaagtgaggctgtggtgattaaatttctctctgcattaattcttctactggtcacgacggcggctcaggctgagcgtattcgcgatctcaccagtgttcagggggtaaggcaaaactcactgattggctatggtctggtggtggggctggatggcaccggtgaccagacaacccagacgccgtttaccacacaaacgcttaataacatgctctcacagctgggaattaccgttccgacgggcaccaatatgcagctaaaaaacgtcgctgcggtaatggtgacagcgtcacttcctccgtttggacgtcaggggcaaaccatcgatgtggtggtttcttccatgggaaatgccaaaagcttgcgtggaggtacgttgttgatgacaccgcttaagggcgttgacagtcaggtgtatgcgctggccgagggcaatattctggttggcggcgcaggagcctccgctggcggtacagttgttcaggttaccaactgaacgggtgacggataccaatggtgcggttattaacgtgaat

SEQ ID NO: 49402 - DNA, 540 bp, Arabidopsis thaliana columbia
ttgtttcctcttgttcactcgtttctcgttatctgtgcagtttataggttttatacagccattattttccatggatcactgcttcatgttctgttcaacatgatggcattggttcctatgggctctgagctggagagaatcatgggatctgtccgtttgctttacctaacagttttgctggcaacgaccaatgccgtattgcatcttcttatagcatccttggcgggatataatcccttctaccaatatgatcatctcatgaatgaatgcgccattggattttctggaatcttgttttctatgattgtcatagagacaagtctcagtggagttacctctagaaggtaagaattttcaagggctacttaaatgatttagactctggaagatcaaagtgcaagtaaatatgagcttcttgttagaattcagatacattctctccaaacatgttaatgctacacatgtctgtacacatattaataagatatgcgtttaatgtcctctgaatgtgggctattttttgcaactctttgtatcatg

SEQ ID NO: 49403 - DNA, 315 bp, Arabidopsis thaliana columbia
aaccttggggtaaagtgattcttacacctatggttatttccgtttaacctttgtacataagaaatgagactcatttttcgttttactgcaaatttcagagcagttttgtgtacacgcatacataacaatcaaattcctgttatgaatgagaacgatcaatttgagagatctatagatattccgttatgtcactgcttcgtctagaagaaacggaatagtgtagatgtacgtctctgtgacaacgcatcgcacgatgagattttgattcatcacatggagttaatggtctctcataacggatcgaatgggcagcag

SEQ ID NO: 49404 - DNA, 570 bp, Arabidopsis thaliana columbia
  unsure (1)..(570): unsure at all n locations
nnnnnnnnnnnnnnnnnnnnnnctaaaggggttttatcaccacattattagcgccacttatcggtcgcttgatgcctttattcccgccactggttaccggtgtggttattacttctatcgggcttagcatcattcaggtgggtattgactgggccgccggaggtaaagggaatccgcaatatggtaatcccgtttatttaggtatctcctttgccgtcttaatttttatcttgctcattactcgctatgcgaaaggatttatgtccaacgtcgccgtattactggggattgtatttggctttttactttcgtggatgatgaatgaagtcaatttatccgggctacatgatgcttcatggtttgcgattgttacgccgatgtcgtttggtatgccgattttcgatcccgtttccattctgaccatgactgccgtgttaatcatcgtgtttatcgagtcaatggggatgtcctggcactgggtgaaatagtcggtcgtaaactctcttcgcacgatattattcgcgggctgcgtgtcgatggcgtagggacaatgataggcggcacgtttaa

SEQ ID NO: 49405 - DNA, 581 bp, Arabidopsis thaliana columbia
gaggatttcaggataaccgaatgaatgctgaggaaaatattagattgatccgccataagcttgatagggccattgcgacaagaaactccacagtaaatgaaaaaagaactctctaacgggaactgaaccaggtatacattgatgaggagctcttttggaagacaaagagtaggaacagatggcttaatacaggaggccgaaacacaagatacttttactccactactaaaacatgatgagtacgaaatagaatcttatcaatccaagatgaagcatgtgtgatacatagaggagatcaaaacatagcaagggttgggactaataactttgagaatatgtacacttcaatgcctgtaagagaggctaactacaatgacgcttttcaaggatacactagcaagataacatcacatattaacaatgatctcacaagactaatgactgagcaggaaatcgaagaatccatatttgcagtggaaccattgaaagcaccaggctcggatggttcactggcgagtcgatcagcatttttggtcgaaaataaaggcccattatcaagaggtaacaacgttttagagaaa

SEQ ID NO: 49406 - DNA, 468 bp, Arabidopsis thaliana columbia
acctcaatgatctgatcatcagtcttgcttgactttaatgacctcttttcggattcaacctcttcgttcttctcttctgagagttcaacagattcttctgaaacaacgtgttcataggttttgactttggagtcaaaagtgactctcttcctagaaatagtgcttggactgcatttctcttcagcctcgtcactgagaaatcagaaaatgttagcttaaaacttgaatctagaggaaaagcacacaaataaaacaatcacactcaccaaatttcagtgattggaatcacagaagctttcgggatctcctcaacaatgtggactctatcattcagatgatgaggttctgcagtttccacagagagtttctatgcataacaaacaaattcatcgggtcaagcaaaatcaatggaagttaaatgcgataaacacggagatgatctatctagaatgtagcgtaattcaagca

SEQ ID NO: 49407 - DNA, 521 bp, Arabidopsis thaliana columbia
caaattaactaattgaaaatgatatactcctaaatttcctattaactaattaaaattagtagctggagatgtgaatggaaattgattagtaccaatgtaaaaacggacaaattagtatgaaattgtaaaagcggacaaattcgtttactcgcatctgattttgtatgtaaacagtgttctctaatagtggcttcatgaatctctctaataaaatatgacttgttgacaaccacaaaaaatggcattgtgctaattagatccaatccaactatctaagtatacatatcactgacttatctttttttttgggatcaaaatcactgaattatctaaaatacatatttttggatttatatttgaaccaaacaaaaagacaggcgtatatataagagactaatcaatcaattagtcatcgaagccgtcttagctcagtggtagagcgcgtggcttttaccacgtggccgtgggttcgatcccacagacggcgaagtagttaattttatatttgatgcttttttttg

SEQ ID NO: 49408 - DNA, 510 bp, Arabidopsis thaliana columbia
atgttttattttgtttcaattagttgtagattagagtttacattatggattaaatttgtttgggcctgcgttttttatagtaattggtctaaagctgcgttgatttttgtagctttgttttttctgtcttgagaaagatgttgacgtgtccattaaagagagtgtttttgagaatgcatatgtggctaggctgagaagcctcaaactgttgcttttattagtagtagattcataaccatgtcatccgattcaaagaagtggtgcaccattgagcagacatcattccctatcaagtcccaaaattgttggtagaaggcagccgtgaaactgtcaaaatttggagctctatttgcctaaatcgaaaggactgcatcctttatttcctgatctaataatgactataataactctcgattcatctgatctgttactttgggtacaactttagaaataacttccgtcgaaccagtattctacgatgtagaaaaaagatcattaaagtctgtttca

SEQ ID NO: 49409 - DNA, 549 bp, Arabidopsis thaliana columbia
tgcacataatcaagcttctctttcgtaacatgttgagctgttccaaaactggtcctacgtgttttcccaacaacgaaattctcacagaactttatcttagatattctatcgtttccaaaacaacctttcttactcaacattccatggcatgttgcccaatatgtcccattctgctgtgccataattgagtccgatcaatctctcctgaaactgccattagagattcagtagtatcagctgtgcttgtaagatatacaaggaggctctcctagtttcttccatgaagatgtttgagccttgtctaactcttaaagttccgttagtacaacttgtatccttctacttctaccgttcccatggatatgagatttcttgacatctctggtatgtatctcactcaaaggaggatgatactcgttccatcttgattagtaaacctgactttaccaatacctttaacttctaaaaacgagttattaggcatcctcacttttccagactttgcttcaaagtctatatgatactcctttcttggtgtcatgtggaaag

SEQ ID NO: 49410 - DNA, 388 bp, Arabidopsis thaliana columbia
agtgtgcgctctaaagtacgatcccgccgggaatatctggctttccagtctgatagcatcgcttcccatcctgtttttcttctttgcgctgattaagctcaaactgaaaggatacgtcgccgcctcgtggacggtggcaatcgcccttgccgtggctttgctgttctataaaatgccggtcgctaacgcgctggcctcggtggtttatggtttcttctacgggttgtggcccatcgcgttgatcattattgcagcggtgttcgtctataagatctcggtgaaaaccgggcagtttgacatcattcgctcgtctattctttcgataaccctgaccagcgtctgcaaatgctgatcgtcggtttgtgtttcggcgcgttccttgaaggag

SEQ ID NO: 49411 - DNA, 467 bp, Arabidopsis thaliana columbia
cagtccagaacacacaaacacctaacaactgttttcgtcttctgtacttaatgagacacttcaaagcttatgctaaattagacacgaatcataagagcaaaacttaaagaagtaaagaaccatgtcgctagacgcgaatacttgttctatcgtcttctttctattcttcactgtctctttcgccgtctccggccaaaagccaaccgcttacgacgccgtcaaactctataacttaccaccaggaatcctcccaaaaggagtggttgactatgagcttaacccaaaaacaggcaacttcaaagtctacttcaatgacacgtgtgaattcaccatccaatcctaccagctcaagtacaaatcaactatctccggcgttatatcacccggtcatgtcaagaatctgaaaggagttagtgttaaggttcttttcttctgggttaatattgctgaagtgtctcttgacggcg

SEQ ID NO: 49412 - DNA, 1344 bp, Arabidopsis thaliana columbia
atctcgaacaagagttttgcctccaagagacaacaactcaaacatttcagcaccattgataagagggggaaggtttgaaccacttctaggactcagagctaaagttgtgagaccttcaagaggccacctgctagcaaagataaccgcaccagctggatgtgacagagagctctttataatacgttataccattgacaggaacatcgaagactctggatccatcacccatcgagtcagaatcatgagcaaagtaaagcgcaatataataagtagccattttcaatggcattggaggccatgtgaactccaaaggctgaacttgagtagctcttagatcggtgttaaatatcctcgacggcggaaggttccagaaaccagaaacctctagtttcctattgtttggtactgtcgaatttaacgaataaggctcccaaaacctatcaaactgatcatctggaaacctaaacaagaagaatgttgataatggtgaatacattgccttggtttcgaaagatttagcatcgaaggaacaatttttctgagaaagtatcaaactttaaatcaaagtagtgaacttttttacctgatgattggtccactgtaaccaaaagcatgcctagcaacaagactcatgccaacagtggtaaagtcagtggaattgtaaagagtaccatcaagcctaacgagctccaaagctgagataaatggatcagaagttgtataagaattagaagcaacgcagacgcttatagatttcccctgcgccagaaaaaccccttcgtaataagaagcgagaccatctgcgtaatcggcggttgtattgacgatcccccataacgtgccgtcgacaatctgatcaaataccggcggcggagtacctttaccgttaactcctccgtaatagtatgtcgtcctgatcatatacttccagccacgagaaacgctcatcacgtagcaaaacttgtgatgagttccgtcgagggaaagagggaaagatctaacagtgaataagatttcgtcgaggacttgatcggaaacgttttttggtgtgccgctggagacgaaagtctcgtcgggttgccattgtcggccgtcgattacggaggaggaagaggcgccacaatcgatcagaatcgctaaattttaaaattagaaatgtcacaaaattggaaattggaagggatacgaatttaggcgatggattaaagagattgaggtgatacctgaaggaggagagggctgagagagggaagaggagaggagggagaagactgtgaggaggaggaggaggagaggggacatggcggcggagacgacggtggtagagaagaagttagcataaaa

SEQ ID NO: 49413 - DNA, 536 bp, Arabidopsis thaliana
ggagtaccgagacttgtgttccacggcacaggctacttctctttatgtgcttctcattgcataaggctccctaagaatgtggcaacaagttctgagccctttgtgattcctgatctcccgggagacattttgattacagaggaacaggtcatggagacagaagaagagtctgtaatggggaggtttatgaaggcaataagagactcagagagagatagctttggcgtgttggtgaacagcttctacgagcttgaacaggcttactcagattatttcaagagctttgtggcgaaaagagcgtggcatatcggtccgctttccttaggaaatagaaagttcgaggagaaagcagaaagaggcaaaaaggcaagcattgatgagcatgaatgtttgaaatggctcgactccaagaaatgtgattcagtgatttacatgtgctttggaaccatgtctagctttaaaaacgagcagctgatagagattgcagctggtttagatatgtcaggacatgattttgtctgggtggttacagaaaa

SEQ ID NO: 49414 - DNA, 458 bp, Arabidopsis thaliana columbia
caaaaaggattttaaaaaggaaagtgtcaaactagaacgagtcagaaacaaggcctaggctgaaggctgaagctacgttaaaaaatcgtcgaaaaaactttataaaatgatgatcctaaataggcctttatgggcttcccaaccattacaagtaggccatgaaaaatagtacgtcccattcccaaacgaaactttggaggcttgtattaatcgaaaatcaagaacgggacattgttatatagtttctgaagatcctatataatgtatgtgtattatatatagaaaagtattaccctatgtagttcactgtgacagagggattcgaacatttagcctccgtaaccatattgaatgcatgatcatatgccacatatcatgtggctttgatggtctgtttctgacacagtgtttccgaacctcgagcgctcttctttgcctattcaagtactcttcttctg

SEQ ID NO: 49415 - DNA, 338 bp, Arabidopsis thaliana columbia
ttcactctaatgtcatttctgataaatgagtctcgcagtaaacgtcgcctattaatccaagcatgtaaacagataattatatgttatgaagaaagcatatactaatctcatcatcagctggccaaattgtaatcttacgtccatataaacttatcataaccactaagaacctcaaaacgtaggtttcatgctcaagtggcaatatctgaatatctagatactttttttgtttaaaattaaaaactgatcggattttcgcagttttttagtcattgtctataagaatttcaagtccaactggttacggctgtagacttgtaggttttccttttttcgga

SEQ ID NO: 49416 - DNA, 501 bp, Arabidopsis thaliana columbia
taaaggctgatcaaaccggatatctatggatgcaatgttcccaaggattgttaaccgagggctcgacattgcgaagagccacccaaaccgcgctgttacacttaaacccgctaccaaaagcaatctgccaaactctgtttcctttcctcattcttcctttagcttccgtgtaagccaattcataccatatagagctagaggaagtgtttccaaatctatgcaaagtcattctagacgcctcaacatgttttggagaaagctttaaactcttctctagctcatcaatcacggctctacctcccgcgtgaatacagaaatgatctaaagcaagcttgaaatccggtatgtaaggcttcttcttcttgtcattgaacaatctcttagcaacaaaagtcgcaaagaacagaatctgctcgcttataggaagaccagaggcccaaagaagtgatattcgtctttaaagcttctccagctatagccataagatctttagacaaagaa

SEQ ID NO: 49417 - DNA, 479 bp, Arabidopsis thaliana columbia
tgatatttataagaacattaggaaagtttctttttgaaaataagcaactgattcaattttgtatcaaatcatacacttaaaattatctcttttaaaaaccagatttaaaaaataataattagatgaaaatatagttttttttgtcagaaatataaattataatttgagaatgtcattaacgaatcatttctagtaataataaatatatttttgttaatttttctataaaatcaattgaaagttgttttcatcaccataagtcaattgaaagttgttttcctatttctttatttttaataagacaatacgaatcgataataaaaacactctgaagtatatttttccaaaacaagaaatcaaaatatgacaagcaatatacaataatagaagaagcaatacatatttttatttatatcttttgatagcaaaatataaattgtttccatgcaaagcctagaattaaaaacggtagacccata

SEQ ID NO: 49418 - DNA, 576 bp, Arabidopsis thaliana columbia
tgtttctttaatccaataaaaacagagagacctaagaaacgagatcaacaaagcccgtcgtttttttcgaggaaaagtgaatgaccctttaagaaaataactctattggccggagaaatggttgagactcgtcgattctcttaaagtttgtttttttttcctctcttcaaaatttttgttcctgttatactctgtaatggcgttttaatttgatacctagaagttaaaagtgaacaaaattttgagagaaagtctcttttttttgttcttccctgtgtgtgtgagagagagagagagatatggcggtttcagagcagagtcaagatgtgtttccatggcttaaatcgttaccggttgctccagagttcagacctactctagcagagtttcaagatccgatcgcttacattttgaagattgaagaagaagcttctagatatggaatctgtaaaattctgcctccactgcctcctccttccaaaaaaacctcgatttctaatctcaaccgttctctggcggcaagagcggcggcgatgggttcgtgacggcggctttggcgcgtgtgattatgacggt

SEQ ID NO: 49419 - DNA, 371 bp, Arabidopsis thaliana columbia
gagttagtgtatggaccgatagacaaattaaatgtataggtagacacatgggctacagttatgaatgttacaattatttcatcaaaagcaaagtactctccatcgttacatgtacatatatacatttcttataattatttaaaacctgtttggtcaaaaggatagtgctcgactatacatatagccaaagaagagcagaaaaatcaaagtcgtgagttcagaagctataacaaaatttctaagaaaaagaaagattagaaaatggagaattttatggtagagatggccaagaccatttcgtggatagttgtaataggaatgttaggtttagggattcgtgtttacgggaaagtgattgccgcacatggagg

SEQ ID NO: 49420 - DNA, 481 bp, Arabidopsis thaliana columbia
cattagttgttttctttttcaagtttgatctttctggcgttgaatttacttaaaaagctattgattactggtctggttaaatcaatcctttaactttataaagttgtgtcctttgtctttccctctcttttattcattgttcttttaattgtttgacctgatagattccaaagtaatttgatcatagattccaagatccaaattctaacgtataaaccatctttttttgtcccaagattattgaatgatcaaacgattagtctttgagactttcttttttcttttccaggttatggaaatagaaagattccattttgttttaatgtttgctcttctttttatgcatcattcaataatagagaggtcatagtaacagaaccaaatgtgtcagagactatgacacaatctcacttatgtcaggtttctttggattcttgtaattactacaatgacctgtgtgtgactctgcactacgtggata

SEQ ID NO: 49421 - DNA, 376 bp, Arabidopsis thaliana columbia
cgtaaaatcactgactataaccaactacgaaggctatgcgggtatataccgaggacgatgacctactgcatctacttaccgtgaaaaaaacgttaatgtatagcgccaaattcagtttgagagattcaacggctaaggaaagagaagagagagtggagagcttgttgagtgatctcggtcttgttctcgtccaagacagcttcgtgggagaaggagacgaagaggatcgtggcgtttcgggtggagagaggaagagagtctctatagccgttaagatgattcgtgatccaccaattctgcttcttgacgaaccaacctctggattggatagtcgaaactcgcttcaggttgttgagcttttggctactatggcgaa

SEQ ID NO: 49422 - DNA, 1030 bp, Arabidopsis thaliana
taatcatgtaatgtgtaatctaaacgcaataagccacataatgcagccattttgtaaattcattgctgtcatttacatttcaataagaaaataaattaatttccacgtgtcattttattttcctctcacaatttagatttagataagtaaagtattagaaaaatgtaaatactgagttggcagaataagacagtggtgagtgtgggtgatgtggatatggtgaagtagtttctgactcctaattggtcagaaatctatccacgacagcctctgagatttcgtctatagattctcattatctcacattgtccctctaaatctcctctctttgattctttctgctccgaaaaacagagagagagaacaacaaccaaacactcatttctccacatcttgagagaaaaaaacagagcaagtatattagagatctcatggcgatggcggtctccggagctgtcctcagtgggcttggttcttcgttcctcaccggaggcaagagaggtgccaccgcattggcaagcggcgtaggcactggagctcagagagttggcaggaaaactcttattgtcgctgctgcggctgctcagcctaagaaatcttggatccctgccgttaaaggtggtggcaacttccttgaccctgaatggctcgatggctcgtaagtctattctcttttatatctgagttactagcatgaacaatgctgaattttcattcatatctctcataaactagcttggacaatagattatgataattcaaggtcctgattactcatttggttctaatttgttagctgaatctcaagagagcatgaaaagcccgaattgtttgttacccagttattgagtcaaatgtgtgtgatattcgcaggctaccaggagatttcgggttcgacccattgggtttggggaaagaccggcttttctgaaatggtacagagaggctgagctgatccatggccgatgggcgatggcagcggttcttgggatcttcgtcggccaggcctggagcggtgtggcatggtttg

SEQ ID NO: 49423 - DNA, 554 bp, Arabidopsis thaliana columbia
aagagaacaaacgggatctaagaagagagcgaaattaaaaaactcatttttattttctcttcctcctcctgagattcgtaaaccgaataccgtgtatttcaaacccgctatctcaccgacgggtctggtaatgatccggatgttttctttttggttaatgggtatcgaccaaatcattcattgaagagatagaaccaatcttgttaatgggtatcgaccaaataattgtcatttgtgtaaaattattgcattccttaccttaattagttaaacatgtcctaagacacaaatgacaatgattagaaacatatggtgctaactcaattaagagcaaaactttgcttcatcctcgcaatctagctatatacatatccatgtcaattatgttaaatcacactatgtcaattacctgcattaatttttagacttaatgattcataagacgccaaaaccgattatctcatatttttggttgatccagaccggttaaacaaatcaaattcggctaggatataaactggagttgaaaatacacactgaagattcatgaatgt

SEQ ID NO: 49424 - DNA, 374 bp, Arabidopsis thaliana columbia
ccctcaatggaataacacactcatttatttatttatttatttatctcaaaattgtatcttcttccccaacagttgatttatttattttgacataataatgatacaacttttttgtgtgtgttttaatactaatacatatgtttgatattttaaaaatattttaatatatattcttaattaacatttaacatcatatgtttgatgttatatgataacggttgattaaaatttaatggaattaaaaaaaaaaaaaaagaattaacatttgttgggagaaaacgttcgtcgaatcctctgacccctttatcgccgacgcttcaaactcggtgacgtatgttcaggtcagttgttgaatctctttctctcgcatcgtt

SEQ ID NO: 49425 - DNA, 827 bp, Arabidopsis thaliana columbia
caaaataaatctttagactcgggtctaattttagatttttaaactctcttagaaacgcatacgtgtcgttggtggggggaagtgtagagacgaaatttttgtttttcacgtgtttatctttcgtttctcgactctacaacaacaaatctctgtttttttatttttgaaaaaccatttgcggctgtgtttcgcggagaggttgaagacaggggcaatttcgtaaatacgaaatcaggtttaataaatgggccaaatttattttcctacgttttctggtgtagtaacttgggctgaagcccaatatgtgtgtgtaagatatacaattactttttgttttttgtgagcaccatgtttagttagttcaatataatggctaaacacttgtaaaacaaacaactaatagacattttttcaaaatttgaaaactttagatcttcactttttggatctcaccattggactctctcaaaattaaaaaaatactcaaagtgtctaaatttttgattttctatttttaaaattacaaaaattatttggatcctaatttttaggatcctaccattggtgaagagcacctccaatgggaggatgtaatccaaaatttgagatgttctcttgaattattggcaaaataaaaataaatcagaagtgattaaaattgacagagctcggctttgtgaagagagattgttgagaataagaagtgtcccaaaagcccaaatttagctgaatctaagacgaagcccataaaagaagcatatatctaacttaaccctaatttctaagtattctaactttagcctaacctcaatcccaaagtgacattc

SEQ ID NO: 49426 - DNA, 802 bp, Arabidopsis thaliana
attttccaattcgatccgatccattagttcgtagagctatttactcgattgcagacatttctggaacacctctaatagagggacatagagtcaattttgaaagaacgtatcgtcagactccatcagatatgcttctaagggactcagagtcctagcgcatgtctcagcataacatctcatagtcgtacactacgatagtatcttcttaattacttttaagataaaatttgtgtagaataagacgttgcaacttttcaaaagccaccgcctattatttaaatcatattctctgagcatagagccgaagtcctcaccaatcaccactcacatgttatcaataattgcttataagaatttgtattcccactctaatcatcaactctattgattccacgcgatgacgacgttttcaacgagctttcttttccttttgttggttttctgcttgatcggttcactagctgccgatgatctccaacataaatccggtcgggacgtctgctccggtggttctgatcttagaacccccgatattcgtcttaaccggccgacagactctgtcgtcggaaactgcccgacggaggcgagtcctttagttatggctgacgacgagaagtacggtaacaaaatggttatcagtctcactcctcgcctttatgactatgtcctcaacaacgttcgtgagcatgaggtgtttaactcttcctctgctttgctttttttcgtcttccacttaatcagatttacagtgatcttacttgtgacttgatttatcttttagattttgaagcaacttcgagaa

SEQ ID NO: 49427 - DNA, 1304 bp, Arabidopsis thaliana columbia
ttttaaaaatcataaacgtactacagaaattaaaatgttgaaatcatataaaattatcctaaatgtgttatcttacaatatgaatttcttaacaatatgtatcttgactgcatatgttctacaaaccatatgaattttgatatcgtaatctcttgtattaaacataccatttggtcgagatttgtaatctaattgatcaatacttttaatgtctcaaaatcattaattgaaattggataagaaatagaaggtttttttttcccaaaatacaaaggttattttatcaatcaatatagttcacgctctatctgtgagagattttaataccaagaggtttatatgcaatttattctaaactcaataacttagcaaattattttgacccgtttcaacatcaatttgacccgacccggttggttggagcatacgaagatagattttcgagttatcgtctccttttcccggtcagttttagtggggaagcagaagatgtcgaccggtttagctctgaatcgctgttcagtttcggtatgtagaacggccgttactttacttaaccggccaactgtctccgttgccaggagtttgaaattcagtcgccggctaatcggaaactgctcgatagcgccggcggatccttatgttgtggcggacgacgataagtacggtaacaaacaagttatcagtctcactcctcgcctttacgactatgtcctctccaacgtccgcgagcctaaggtgtgtaactcttcctctactttgatttatagagattttacttgtggttcggtgtcttacttgattttgttttagattttgaggcaacttcgggaagagacttccaaaatgcgaggtagccaaatgcaggtaacagtttcactggattcatcttgttgatgagctctgggttatgctaattgtttggaatttgaggtgaaaatgaagaatgcacaatacatttgattttggctgtaggtgtcgcctgatcaagcgcagttgcttgcaatgcttgtacagatcttgcagcagaaagatgtattgaagttggagtttacacggtgtttaatcttcttcctatgagtttcttgagcattgttatcttagctcaatatcgtcactttcgacaataatgatgagcttgtgtttttgacagggatattcttcattggctgtggcgttagttctaccagaatcagggtgtttagttgcctgtgaaagagattctaactctcttgaagttgctaagaggtactacgagcttgctggagtctctcacaaggtgagaccgaaaaacatcacattca

SEQ ID NO: 49428 - DNA, 543 bp, Arabidopsis thaliana columbia
atatttggtttaagttctttcattcggttttctgtccaagatgaagagagatggagagagttaaaagagttattgtacgactcatcaacttgcgcaaacacaacacaaattgtaccaaagtttgtctgtttcgattctcttagatgaataatcaactagggttattataagaaacttaaaaggctaatagtagatttatatgaaactgtacatcactttcaatttttgtttttaaccaaaaagaatcataaatctaaatcaaatattttgaggttaagaaaaactgatgcttttagttttagctatacacaagagtaaaaaaaaaagaagatgtgactcccttgttccaaaaactaagggtgtcagtttatatggttatgctcccgccatttcttccgacggttttttattgatgattctgatcctccactggctttattctgtttaaaaattacatcttccttcggattctgattcactcatttaggttggaaatagctatcgtagatggcaagccgatcaaacgcatcaaaatttgctttt

SEQ ID NO: 49429 - DNA, 512 bp, Arabidopsis thaliana columbia
tcggaaaaacgcgtgatggcgatgtgagctcttcaaaaatccaaaagatcctggttggtttacaaaggagtccatcatctcccttttatcctccaacccctttctggaaattagatgtgccaccgtcttgataagaattcttatggaataagatgcaagtgactcaatgaatttggtatttgtgtcatcttggtattaaacgagcttttgcttatagtatatgtgtaaaagatcttctgagctcttcaaaaagttgaagttgattctttcatctcggggttttctagaatttagtgatatgattaagaacacaatataaagaatgactctttatttatgctttacaaactctctcaaaactaaagatctcaagttctctcaaaactctaaaaaactcataagttgtatcacaccttgatacacccttttatagagaactctcaaaacaaaccctattagaactatgattagatactcctaatataactctaaataactcctagaattattag

SEQ ID NO: 49430 - DNA, 495 bp, Arabidopsis thaliana columbia
cgtcgcttagtactcatcggtaatggatacaccgaaatgttagtcgtacaacaagcggattgccatccgccgcaaccccaacggtaacattgttgaggagttccagtacaagtacaaaccggtacaggtaaaccagaaatgtccatactcacaccgttaatcacaagatcaacactcttcttaaccggtttcacacgctgctgctgctgctgaacattgttgttagtaacatctctctcttctttcggtttacgcatcttcttagctttcggtaccgttggtgttgcgatgctgcctctcatctttctcttcttaccagtctgctcttcacaaggagcaggaggaggaatcggattctcctcaaaccgggatgaattcaaaaccggttgatgtatcatctgaatcgaattcgaaccagatgtttccgacaacacattactataactcggtgtacttataggcaacatgttgaagaacttgttgtcctttggttga

SEQ ID NO: 49431 - DNA, 482 bp, Arabidopsis thaliana columbia
tggaggatgtcctagatttgtcctcacaggagtgcttattgtttgctgatgcataattttcttctcagcttccatatctaatattttctcttcaagcctggagatgaaacatcaacaagacaagtaaggaatcaccgcaaggctctcggcaatgctttggaaggatagactattgcaaaggatacctctgcattgcagtcttcaacttcactagtttagattcagcctccaatgcttgatttagtctatcctggctaatcttggtggtctcttgaagttttttctctgtctcaccgattttcatttccagtgaactcaccatactctgtaagaagagcaatttagacaaaaaagatcaatcgtttttcagcagagtttgtcatctgaagagatctgagtagttaatattctcaaatcttaagtatttttgctcttctccggtaagtaagctacaagttcagaaattctcacaaaccttcagc

SEQ ID NO: 49432 - DNA, 605 bp, Arabidopsis thaliana columbia
gtctcgtagtatattgttttgtttcatgattatgggtatttctacttctgtcatgtcaggctgttgctgggcttgcagctgatgggaggcaaattgttgcgcgtgctaagtctgaagcacgaagctatgagaggtatcaatgaaaacatcagtagcttatatctaagatttattattatgaaagaactgttcaactcctaaagcttttctcaaggggatgtttctcttagttaaacgttcaaaatattttttatctgcattttgttagattaaaaatctaaatatatgggtataagatgtcaatgtgtatgttctcctttcttcctacatggctttgcataactttttccgactgtgtaaccaactctaccttcacttgtgataatttagtgtttatggcgatgctgtacctgtgaaggaactttctgagcgtgttgcaagttatgtacatctgtgtaccctgtattggtggctcaggtttgtccaattcatctacgtctttggtagtcacctacgcatttccctacttgaatgaattataagaaaagggtatttattgtgtaggcgttttgcgtgtggggttatcttggcaggtagatagagat

SEQ ID NO: 49433 - DNA, 520 bp, Arabidopsis thaliana columbia
tgaatatactagaagcaatggaacctataaggaaaagcaataattgagaagtacataaaattcatacaaggtaatgtcaacagaaaagaggaaacaggaagaattccagaactagtaggtaaggcaagagaaaatacatacccccacaagaaaggaaagccgctttgacccggaaaaccgattttgaagataggggatccctgaaaacccaaagagataagatccactgtagaaatgataagtatttgacgacaagagaatcatgtgatacctgtattgaaagcatggacggcactaagcaagccagcaataccagaaccagcctatagcacaggagacacctagttagaaacagagtagtatagctaaatgcacagcaagataaatcgatttccatgctatccaaaaagccaatacacatcatggtatcccaaccaaaaaataattcccaccaaaatactaagtcaaaagtcaaaacacaacaaatctgtgaacggaaggatacttggagaatatgatg

SEQ ID NO: 49434 - DNA, 463 bp, Arabidopsis thaliana columbia
tgataattattttcttagtgttgataaaaaaaaatatatatatatcacagttcacacatatcataatgattgatgaacaaacactaaaaagaatatttttgaaaaggctttagaccatctccaatggttgtttttattttatttttataaaatagaaaaaaaaatagagatttctactttcactacaataattctttaaaaatagagatctttatttgttagaagagaaaatagaggcaaaaaaatagagataaaaatagaaatgggttggagtaaaatagaggtagaaatagagtatagagacaaagatagagatgagttggagatgttcttagagaaaatacaattaaagaatgaaagtgtacaattcttttgcatcaggatttgatgtgttttgttaatgggtaagattgggctttattgattctgtccaatctgagaaacagaacgatcagcccactac

SEQ ID NO: 49435 - DNA, 859 bp, Arabidopsis thaliana
gatggagggttcgagtgtaggcgactctacaaagtttcatgtgatatcatttaagttagaacatatatgttatgttacagattgtttcatcacgcgcccaacacacaaaatacttggattcttgtacaaaggttacgttggtaggattggacctaaggttctgccaatacatgatgctgaaacgttgaataaacactttcaaatcaaggtatgatttactattttttatctattagtattacatttttaaatcgcattttatgttcttgctaatacacacggtaaaataatattgtgtacatggattattggaagacatatcggaaactaaagtatgcacgacaattggttaggggtagtcgagaaagtggatatgagcagctcctggcgtacttgtacatgctaaggagagaaacttctggaacttttactcgacttaaagttgatgaagaaaaacgatttaagtacttgtttctagcgtttggtacaataattttaggatttctttacatgaggaaagtgataggtgtggatgatacatttttgcaaggaaaatacttaggggcacttcttaccgcaacggtccaagatggtaattttcagctatacccgatagcgtttgccgtggtggacactaataataatcaatattggaaatggttttttaaacaactaagttgtttgatacaagatgacgaaagccttgccataatttctaataggcaccaatccattggaaaaacaataaagacgttttatcctaaatctagctagggaatatgtacatactatttgtactaaaatatattagtctgctttaaaggtcgggatacatttggtttggtaaagaaggcagtga

SEQ ID NO: 49436 - DNA, 887 bp, Arabidopsis thaliana columbia
tggagatagtattcaacggtgagcgagtgcgcacattggtatggatggtttgtcttatgtcttcgtctgtccgatgccgcaaacagctgatgataagatggctgcgcttgatagaatatgcaatgcttatgatgaaagagtgaattcgcgtatgccacaggagcaaccgcagatgtatgccgggagaccagaggagcttgctaaggtattgctctttgaacttgccttctttctatttattgttctatctaatttggtttctgatgatccaggaacctgatgagaatttgactatgagcatcgcagctgctgaaagttgtccatctgctcctgtttacaagtatgcctctttgcaggaaatcagtgacttcaaatctgttttccgcaactttatgcaggtactcctcttctgcctgctcttttacttttgtccttttccaagggaatatgtgttgcatttgtctgtgtatctggtgctttcatttccatcaaacggctgttgtcaatcttctttctttcgcagaaaaacggttacttaatcacggcaattgaagatcagatgaaggtaattactgaaagacatgcttcagctattctagaatagagaaagcaggttgatggatattccctgatagtagaaggagactcaagcaccgatgatgagagtgactgtgagacttcagcttatgaggaggcacgagatagcttacttcagcgtgccgacaaaatctttagtgatgcatctgtggtgtactcgagctttcaagggtgaagtcgatatttaaaaggggtgcgcgacaccttcacctgctttccgggctgcttacacgtctttgaccgttccttccatgtattcaccttatctaagactggagcttttgagatgg

SEQ ID NO: 49437 - DNA, 518 bp, Arabidopsis thaliana columbia
gtcgagaagagaagaaaaggcttacactgagggactgtctattgcggttgaaagacttgaagcaggaaggaaaagaagaggtaacacatctggagatgagactagcgaaccaagcaataacaaaaagaggaaacatgatgttacccaaaaatattctgatgaagctgatacccagaggtaaagtctgatcattcaatattaaattttacacatttgttttcttgtttttacatcaattttaaaatctgaatcttacatcttctttttctcagtgtcatatcaagcccgcaaaatgtgcctgaggacaaacatgaactaccatcaagccaaacccagacgccaagtggtatggtagtcatcagtgaaacagttaagatcacaagagtaacgtgtgagacagaggtgaccaacaaagtcacaacccttgactgctcagaaagtccttcggaagcagggagaaagatgggagaggagacagaagatggtgattgcaatcaggtagttttcatgactctttg

SEQ ID NO: 49438 - DNA, 517 bp, Arabidopsis thaliana columbia
actctcaaagaacaacatcattaagaaaagaaaaccaaaagcggcgaaaacattcaaaatcagaaatacactaaaaatctacagaataagcaaatagatccacatgacattaacaagaaacaagtgctttaatcaaacctcaaaaatagatggatggtacaagcatgcatacctgaccattagagaggaaatcagcaacatctataacagaagtgaactctttaggaagcaattctggtttgttaacaccaacttttgcatctgcaaaccccacgcctgcaaaaagagattcaaagttattgacagctaaaatcttgaaattgcatatgcattgttcatagttatggaataagagactaggtccgaaatttcacaattctgactttgataagccaatgcaacaagtaattaaagtcacaagcttgagattgcagagtaaacaaaaattctaactttgtgatattttagattgttttgcaacacatccacattgttactgaaatcaaagagcatgttg

SEQ ID NO: 49439 - DNA, 523 bp, Arabidopsis thaliana columbia
cgtcgtgcagagagattacgccacgtggcaggtacgtacagagcggtgcttactaaatttctgggtgttttcttgaactaaaaagatagatcgtacaattttgtacttatagacgaccaaagggtattatggtaaattgaaagcgaagaagtcaaatactgaaataccccaatttgtgtagtagaaagaaacaagaagtaaagaaatcaatcaaagtaaaggaaagagattgggttttgcgttacagcattgaagaggttggatggtagtgaattggcagtaatggtgaaggaaagaagagttggaccccaggtaattatgagccgatggaaaataaccaatgcctaaatacgaataaggtaaggtttaggaagaagatattatagaagcattttcttgaatagtggtgtgagttgtaataaatgggtgtgagtgcataagtgggaaacttggacgtaaatgattataagacatgagaatggtcacatccgttgctggaaagtggaaaagtgtggctaaataa

SEQ ID NO: 49440 - DNA, 412 bp, Arabidopsis thaliana columbia
gctctaaagcggtttaccgtcaaaatcatattttttgcggttacaggtacgagagataaaaccatccgggtgatgggtatcgactgtcagggtaaacagtgagaatcgctgacctgagcgggaaagctcttcaaactttttccacgcttcatcgagaacggtatcgtcgtagaatccccagtcgttgcgatagtgcgggtcggctaccacgcttttcagctcttctgagccgtataagtggtcgaagccatgcgacttcaggaacacatctttaccggcaaaacgcagattcgcgccctgcacgaaatagttctgataacccgagtttttcaggatatctcccagacagatgttctgcgggaagaagctggagacagaggcggatgcgttgccttcaaagggggcaaacagc

SEQ ID NO: 49441 - DNA, 464 bp, Arabidopsis thaliana columbia
ttttctccagcctagaatttagatattaatatcacattattaagaaaatactacactgcagtttattatatacacaacattccatatagataaaaaaacagatcagatcaaaagtggacctacaaagcgaagattatatcaaaagatgccataaacgcatctctcacgctatgatccacataaaacatccgaaatttaattctgtttttacatccgacatttaattcttgttttctgtttttacatcatttaattctggttaccacgacatttttattgttttaatggtattagactctatatagacatacaaaactcaaaacaaaagattcaatgatcaccccctaccaaaaaaagaacagattacatgatcacgagttggcttaacaacgagcacttttctccaaccaaaaccaaacttaactattcgaaatcacactcaacagcaacagcaacgtctgttt

SEQ ID NO: 49442 - DNA, 398 bp, Arabidopsis thaliana columbia
ttttaacaatataataaccattaatatcatattttagaaatgtgttagtttttattataggctaagattttttttaaaaatttagatatataaacgtaactaagtatatattaaaaaaaggtctttaaaaagatatacttacaaatcagtttttttgagaaatattctttaattaaacaaaattgttttgatttttaatatatgggataatatgataatataggcaataaatcaatatgtagcacaattatgttaatggcaaattttgagaaactaaaatcattttacgctaaacttttctttactccgtcttttaaatatatatatatatatatttaccctggagagtgggggacaaaaattttcaagacatttaagcccttttacaaaaacacgtt

SEQ ID NO: 49443 - DNA, 482 bp, Arabidopsis thaliana columbia
tttttggggtctcgctattgtatgactgattttggtctctttctctaggtctacatcatagactatggtttggctaagaaatatagagacagctcaactcatagacatatcccatacaggtaacaagattttggatgtcacagattcagcattttcagcatattgtatgtcagcttcagatttcctgacaacgggttctttattgtttggattttacgtgtaaatgattcagggagaataaaagtctaattgggactccgaggtatgccagcttgaacactcacctagggattggtatactccatcactttctataaaccctcatgataatcgcggatctttttctcctctttcactgattactttttgacatttttcacttggtagagcaaagtcggagagatgatatagaatcgcttggttacatcctcatgtatttcctcaagggaaggtgagagtcattaagtaacttttctttctgt

SEQ ID NO: 49444 - DNA, 416 bp, Arabidopsis thaliana columbia
cggcaaatatccaagtcgataaagatttcagcgccaagctatcaggatacggttgtgcaggccatgcgcctgactacagagacatctaatagttcggcacttgctaatctctctgtcgagactctagagagagggcttttgaccccgaagagcaatgtgtggagctatggaatagttcttcttgagatgttaacgggtcggaaaaatatggacgggtcttacccgaaagaagagaggaacttagtgaaatggagcagagcttttctagcagatgattgcaggctctcgcttataatggatcctcagcttaaaggtcggtttccggcaaaagcggctaggagcatagcagatatagcacagaaatgtctgcaggtggagccttcagagcgtcaaccatgagaaacatcgtggatcaa

SEQ ID NO: 49445 - DNA, 590 bp, Arabidopsis thaliana columbia
taaaaatgctatctttttgcctatagagcctttatatgaatctcctttcttcattccatagcttaagagtttatcgaatccagttgaatttgaaaagatgcatttttggttattgattttgagtgttcttgtatcaaacttgttgtgtagaagatgagaggtgggagtctatggcagctagggcaatcaataacccgtcgtcttgctcaatctgacaagaaggttgtgtcacgtcgctactttgcctctgaagctgacctgaaaaagactgctctttacgacttccatgttgcccatggaggaaagatggttccttttgctggttggagtatgccaattcagtacaaagattcgattatggactcaacggttaactgcagggaaaatgggagtttgtttgatgttgcacatatgtgtggtttgagccttaagggtaaagattgtgttccttttgttgagacacttgtggttgctgatgtggctggtttggctcctggaactgggagcttaactgtgttcacaaacgagaaaggaggtccattgatgactcggtgattacaaagtgacagatgacatatctatttggtggc

SEQ ID NO: 49446 - DNA, 375 bp, Arabidopsis thaliana columbia
tagtccgagccgaagatccatacttccatcacgtatggcacgtgacctacggaaccgtgtctcctcacggtgttccacaacaagtcattctcatcaacggacaatgccctggtcccaacgtcaactcaacctccaacaacaacgtcttcattaatgtcctcaacaacctcgacgaacctttcctcctcacatggtaattataacatttgtctcacggttcaccaaaatatatcattttcaatatgcctgctcataatatatgtacggtctttgcgttttaggaaatgcgatccaacacacgaagaactgttggcaagacgggacccaggaactatgtgtccgatcactgccgtcaccaactacacttaccatttc

SEQ ID NO: 49447 - DNA, 316 bp, Arabidopsis thaliana columbia
cagaataatctaatttaagatctcgccacgattgagaaattacctgatcacatattatgattgtccgtggcccaaatcctgatctacaaaaatcagaaccactgcagacaaaatcttttattagctaagattataagaatatataccagtttagttttatctatttactatttggccagacataccaaatgctgctatcacatcagaacctctactcttaatacactttagcataggacataatggtcgatcgagacatgtagtacttttaagagacctagcgttcttccgggacaattaatttaagatagacctg

SEQ ID NO: 49448 - DNA, 448 bp, Arabidopsis thaliana columbia
ctgttcaacgttgatgcaccttatcctgaagcgggattctatctgcaagaattttgccaatttagtatgtgtatctaattttgtacgcccagttggattaccagatgttgatgctaaacatgatgtttactctcttctataataaatgtgtagacttgggcccaaatgagcgaaagaaaaaattgcagacaagatacaagataaattcactctggttaagtcacaaagatcgtcaagacaaatgataaagatccattacatcaggaagataaatcaaaagacttaggaaaatagaacagatgtgtgtttatctatctctgtcaaatccgccacacttcaagatttacaatcacccacagaacctgcctaaactacgtacaaagctagctttctatcttctgagttgttctataacttcagcgctttgttgggttcttagacgccatta

SEQ ID NO: 49449 - DNA, 311 bp, Arabidopsis thaliana columbia
ctagtatcgtccgccagtgcttccgatcaatctccagatcgtgattgtttgttttcaatttcatcttctcatgatccagagaaggaagacaaagattacgatccgcaagattccgaatcgaactcagcaagcctcttccggaatcgaactctctccaatgtaaatctcgatcttgttcgatctctatttttggtggaattgagattgttaattaggtcaaaaattcgtgattgtattaggatgaagcaatgggactggtgttagagtgcacttcggttaacggatggacaaccggttccggtatggaagga

SEQ ID NO: 49450 - DNA, 606 bp, Arabidopsis thaliana
gcatttccagagaggaatgtcacatgttgggtcatgacgttgtcggagagcatcaatttcgtcttcgatagagtttagagtggccgtacggtgtcttcgacgcacatgagaccggagaacatcagcaacagaccaagatgaagagatacccatatcaatacaacctcgggctcccaatacctcatataaagacccaagagaacaccaattgtcataccaaaaagaagtacctaaacccgagtgaacttccattttaaaaaggtttttggctttatctctatacttcaagatcttctgccacatccaagaacccaacgtacttctcccccgaggtgaccagaacgatctaccatgaagcagatttaaacggatccaattagcccaaagcgagtctttagctgaacaaattctccaaataagcttcataatgcacacatttccatcgagctccggattatctcaccgcattaaatgaccatagtgatgttttctgctacgatattatgtgtcatgatatatttttaacatatacaagtttctagatgctttcttatatacaagtttgctacttctccattgacttacgatcttatggtatgaagcgca

SEQ ID NO: 49451 - DNA, 890 bp, Arabidopsis thaliana
taacttttaaaaagagaatcttgaaacataaacttgatttaatcatattttcatggtgttttgatacatttgcagaatatggggttcgatttcgtaaaaaactcaagcatgaatgggataacatcactcaacagtaaagccggacacttcaatttcttatccgttgaccacttcagcatcactagagtcaacataatagctcccagcaatagtcccaacactgacggaatcaaaatagctttatcaagtaacatgcaaatctcaaacactcacatcagcaccggagacgattgtatcgcaatgctctctggaaacacaaattttgatatctataatgtcaagtgcggaccgggacatggaattagtattggaagcttaggaaaaaacaaagacgaaaagaatgttaatggtttaatggttagaaattcggtctttaccggtacgaccaacggtatacggatcaagacatgggaatcttcagcttcaacaatccgaattatcaatttagtgtatgagaatctacagatgataaatgttgaaaatcctatcggcattgatcaaaaatactgtccttacccgccatgcagcaatatggtaacttactatgcaagaaacaaatttctatcttcttagaatcttcatcgactttgaaattaacatgttagttcatgttttatcgcagggagattctcacattcagatccgaaacgtgacactaaagaacatttggggaacatcaaagaataaagtggctgtgaaatttcaatgtagcaaaacctttccttgcaaagatgttcagttaattgacattaacttaactcaccatggagtcgacggtcctgcaagtgcgttgtgtgagaacgttgatggatctgctactgggaagatgg

SEQ ID NO: 49452 - DNA, 398 bp, Arabidopsis thaliana columbia
tataatcttaagttgtttcgcggcgatcttattgccggtttaaccatagccagtctctgcattcctcaggttagaaaaaaggttcaattacttctgccacaagttacttatgtaagaaagcataaactgatatgtattcaaatggtttcaggatattggatatgcaaagctcgcgagtcttgaccctaagtatggtctatgtaagttaatatcaatatcctaattaagcctcatttacgtttttattgtatgtattctttgaaaatgatacaacaattctaattataagtgtataaaaatgtgtcaaattcttgaatagattcacgtattgaacctccgttggtgtacgcatgtatgggaagctcaaaggatatagcgattggacccgttgcagtggt

SEQ ID NO: 49453 - DNA, 500 bp, Arabidopsis thaliana columbia
ttattagacatactaaactcaattatcgatcaacatttctaaccccacaagtttatcaaactgagctgggattggcgaaccggaaaaattgttgtaaccaaggttcagatcacgcaggtgacgaagctaaaaagactactattggatttgagcttgccatggaggaagtcgtcactaaggtctagcccaatcactttgcctgacttagcatcacacgccatcccaagaataacaatcactttaaatcaacccaagtagttttctggatcaaacactctttcttgaactcaagaagagcatccctttggtcagaatcacacaagtgttgtgtagatgaaacaaaagtgtttagaaaaacttgaaacgaggagtaggaaacaaatggaacgaaggatgaacctcattttctgattagataagaaagcttcaatatttttgaagaaaaaaaggaagttatcgagtagtgatggtaaattagtgtggtagatatgtataaaaaa

SEQ ID NO: 49454 - DNA, 709 bp, Arabidopsis thaliana columbia
cattaatgtattcttatcctaagtttccaaaacattaatgtattatcccttactatacaacaaaataaaattaaccatttcatatttgacacgtgtcatcatctttagttaagcttttccactttcccatctctctctctctcttcctcctttcatttctttttgtgtcgccgtctgcaatttctctccccgacgctgataaccctagcggcttcaaattacagtcgcttaacgccgagttaggccaccgagtccgatacgaacctgattcggtcgctgtcgcgaagatccccgtagttttccaatttctggaaaggttttgttgctgtctgttaatttccctttgaattgttgtctgaaatctttgggaaatgttattgattttggaaatgggtctcttttaatttccttaaagtttgtcttttttgtttgttaattgagcttgtgatccaagcatggaaattagttatttttttttgtgttgcgatctgagattttgcctctttatgtctctcctagtatgtaccaagtgtgtgttcttgtgagatgctgataagtattttgcattgaaatcacagagacgaagaaacccttttccagatgcaatgcctaatggctgatggagctctagatactttagattccgacgataatttagctacagacaatgtttagcagttgttaagagttcccgatgtggaacttgcag

SEQ ID NO: 49455 - DNA, 489 bp, Arabidopsis thaliana columbia
tcacctagtgaaaaaacaattcatagatagaaattaaattgcagtcttctcaaatgtgtgtcgaatcgtataacctagtggttgcggtatgaatatattagagggtacattgtaacatgaattatattatttaaagataattactactttttccggtagaaaagaaaactactttagataattgatatcggatatagctggtttgcattttcttttcaaaattatattcagaaaggagacaattttgaccggacaaaactagatcgaacaattatttgtgaaatgcctcgagatcttcaatgtcattcaattagttacaaatagagtattttggttaattaattaatggtctacattttatacccataattaaacaatcattagacaaatctaacaattataaaagattctatatcccaaatactttgcgaagggaatgcagaggtggctacatatacacacagtcacatgtgcatagataaagagtat

SEQ ID NO: 49456 - DNA, 609 bp, Arabidopsis thaliana
  unsure (1)..(609): unsure at all n locations
ttcaagtgtgctctaaagcgttgctgcagctcttgagcagatgcctcgcttcaatagttcgctgtcggaagacggtcagcgtctgaccctgaagaaatacatcaacatcggtgtggcggtggataccccgaacggtctggttgttccggtattcaaagacgtcaacaagaaaggcatcatcgagctgtctcgcgagctgatgactatttctaagaaagcgcgtgacggtaagctgactgcgggcgaaatgcagggcggttgcttcaccatctccagcatcggcggcctgggtactacccacttcgcgccgattgtgaacgcgccggaagtggctatcctcggcgtttccaagtccgcgatggagccggtgtggaatggtaaagagttcgtgccgcgtctgatgctgccgatttctctctccttcgaccaccgcgtgatcgacggtgctgatggtgccgtttcattaccatcattaacaacacgctgtctgacattcgccgtctggtgatgtaagtaaaagagccggcccaacggcgtntnatgtttctggtaatctcatgaatgtattgaggttattagcgaatagccaaatcggttgccgtttgttgt

SEQ ID NO: 49457 - DNA, 530 bp, Arabidopsis thaliana columbia
aaagtatcaaaccttgaagctttggccgtttttgagctcaacaaaagcttgaaactcccgatccatggagctagcaccgactgtaataacccatggtgcaacgtttgagacagtgccagacttaggacctgaatttccagcagagcacacaaccgtcaccccgtttttgacggcgtggaaggatccaatggctataccatcgctcatgtaatctccagcatctcctcccactgaagccgagagaacatccacgccgtcttcgatggcagcctcaatcgctgccaaaatatcagcatcaaagcactccgcgccatccacagggggccagcacaccttgtaagccgcgactctagctttaggagaaccaccactggctgttccattcccgataccaaacacattggctccgggaacaaagttaccagccgcggtggaaagagtgtggctaccgtgaccatcgtggtcacgacaggtttcataggaggcgttagaaggaaggcctgtgtaagctaagtaacctttgttgaagt

SEQ ID NO: 49458 - DNA, 515 bp, Arabidopsis thaliana columbia
cctcacttcaatcatgccaaataacaaacacatagcctccaatttatttaaaaaaaaccttatcaatgcttagaacaaaaaatcctaatttacaaaacaaaaccctaaattcaaaaaattcaaagaaccttaaaacaaacatcaaattttccaaattaaataatgataaactggcataaaagaagtagattcttacacattacaagattccttcatcgagtactctcctgaggtggatatggatctccggtttcaatcattactcagcgcatattgtgaccagcggctctacaaatgacgaatctggcccaaccactactcatacaacatacagaccacctcatttctaccctcaatcgtcggagaaaatgtcactctccaccgccatcaccgtcgcatcatctcgcccagagagagagagagagagagagagagagagagagagagagagagattcttgtaaccgagcgacaatgtctgtgacttagtgaatccgagtcggggaagatcgaaaa

SEQ ID NO: 49459 - DNA, 612 bp, Arabidopsis thaliana columbia
cggtggtggatcttagaggaaagccaggagtggcggaagaagcgccgccggagaaaggcggtgagggaggagaagcagggaggaggaaggaagaagtagtcatcggagtgtatttccattatgatatctgattgtgtggccaacgctgtaatggtctttcctcgcctatttttttctgtggttcccttttaaataacacaatctccctacttttggataaggttttatattctctattttttattttttggttagtatttttcaagatgacattcctgtattacctcacaaagaggttaaccaaaaccaacaaataatcaactaaagaagtacttattcattcaaaaaagagatcacaccaagtcaccaacaatgtagagcatctgaattttgcgttaagagaagtaaaatagtgtctttcttttattagaagagagtactaagagaaaacaagaagcagacgtctcactcactcctcttcttcggcctcttcgagccaattcacaaacggttccaatcccttcacaaacgtttgcctgcaatgcagaacgaacacaaaccattattacatatatgttactaagagaatactattatgtaccttgtttttgt

SEQ ID NO: 49460 - DNA, 600 bp, Arabidopsis thaliana columbia
tgactcaattcgattttatccttacaaagaaatagcaatgaaatccctaatgaaacaatcctaactcaatttgattcaatccaaaactatgaaccctaaaaatcaaacatccaacgactcctcctcacttcaatcatgccaaataacaaacacatagcctccaaataatttaattaaccccttatcaatgcttagaactgaaagccctaatttttaatactatgaaccctaatttcaaaaattcaaagaactctaaaaaagaatatcaattaccccaaataaatcatgataacgcacaaacgatcgggaatgagagagaacactgcaaattaaccccttatcaatgctcttaccaattacgatccaagctgaatcgattactctccatccattgaatttggatctctaatttgcagtgttctctctcattcccgatcgttacataagatgcatcatcattctcattcccgaccactcaattcctccctcaatctttgccgtctgcctcaatcgtcggagaaaatcgacaccatcatcatcgccatcactggcaaaaaagagaaagggagaaagagtcttgttttgtattgaagcgtgatg

SEQ ID NO: 49461 - DNA, 585 bp, Arabidopsis thaliana columbia
ctttgagcttcctttgtacgacacttggcagagtcaagttgttgatttggctattgttggtggtggtcctgctggtttagccgtggctcagcaggtttctgaagctggactctctgtttgttccattgatccttctcctaagctcatatggcctaacaattatggagtttgggttgatgagtttgaggctatggatttactagactgcctggataccacatggtctggtgctgttgtctatgtcgatgaaggtgtcaagaaggatttgagccggccttatgggagagttaaccggaaacagctcaaatccaaaatgcttcagaaatgcattaccaacggtgttagatttcatcagtctatgatcactaatgcgagatcacgaggaggcaaactccacttgtggtcatgcagtgagggtgtaaagattcaggcttccgtggttcttgatgccactgggttttcccgatgcttggttcagtatgacaaaccttacaaccctcgggtaccaagtagcttacgggattgtagctgaagttgatggtcaccattcgatgtagacaaaatggtgttcatggattggagagc

SEQ ID NO: 49462 - DNA, 463 bp, Arabidopsis thaliana columbia
agtgtgctctaaagagtgctatacacagggacatttgctgatccaagttcaaagcattcatatggatttggtgggagaatgtgactgtcatcttgactgttcaaaaggtttataaagcttgaagtatgatgatatggattcggtgaatccatattattgtttgtggttgtgtgttttaaaaatcaaaggttacggttttgtgttttaaaggcaaattatggctttgttagacaactcacaatcaatgccatactaaatactattgactaaaattaacctaccaagcaatcatcacagttttacagttttaaatgctataagaactagcatttgacgtttacctacaaaagcaattgacgtttatctaactacagttttatatcaacaaagaagcatttatcacagtaaataacagcaaagcattgatcacataaatagatacaaaatgataaattaccttgca

SEQ ID NO: 49463 - DNA, 502 bp, Arabidopsis thaliana columbia
tcatttcgccgctagtatgccaccgagtctccggttatcgaagatgtttctaccgatgttgctgtgtctgttagcgaaaccaatcgagaagctgttctattgcataatttagaggaactcgttaagaatctgacggaattagtcgctaatctagatgctaagttatctgcaactccattaaaggagaagaacgagatctcagttgatgatgacatcggagaagagaaagagagaggaagggctaaggcgttttcagtgactaaatacagtccgttttggtcggagaggtttcagtttacatcagctgtgaaactcaattccgatgcgacttgtatcaatgtgttgccgtttagagatttcgaaggttcaagcaagtactttgcaattggtgattctaaaggtagagtttatgtgttcttgagaaatggtgatcgtttgattgagtctttcaccactgttgattctccggttactgctatggtttcgtattcactgtgttaag

SEQ ID NO: 49464 - DNA, 554 bp, Arabidopsis thaliana columbia
gtacatccgaaaaccctaactggtgaatttggtaaccgccttcgtgccttcgagattttgttggtgaatttgctcctgtacggttaattggttttcagcagtacggtttctcctcatgatctggaggtaagcatagttcattttaggtttttgtttgatgtttttgcttcgggagtttctgttatgaaggctaaaaatttgatacttaatatatgtagtggttgcagcatagatcgttttagtaaagttttgtttctatattttatctgaggttatttggaggatttgcaacaaaggttgctgcttgttgattggatataatccacaggcgtatgtgcggagttacctctccagcttagggagtttctccgccggagctttcccggctggtttcttctctgccggtttcttctccgctgctttcggcgccattagagatatttgatgaaaattgagtttgattttagtgattttgagaatgtgagaattgagagacgcgttgatgctgaatgatgataattgtttatatacagatatgtactgcatgtaaatgg

SEQ ID NO: 49465 - DNA, 459 bp, Arabidopsis thaliana columbia
caaccgaatatatcgaatatgtaacgtttgatcccgatggaacaaatgtcccgtcaggtaaaacatcgttggcaacaacaaattttgaatcttctggtaccgatggatatagcctcaatgtttcggacaatgccgcttttaagtagaccaactggtcaatttcatcgaaagtcaacggctcgtcggtccacttcgacacattggtgtcacgtgtcttgatcagaatggtgcagatctcgtttatgattttttcttcgactcgtgggttaagactaaccaaccagaagaaccaactcatagcaaccgatgacgtgtcacgtccagctaggatgaaatttaacgccacgtatttaagatatttatccgagtaggattcttttttcttcatgaaccgtgacaatagatcatcatggcgggattcatcttgttgctgacctagcaattcgagcttacgtgtat

SEQ ID NO: 49466 - DNA, 1502 bp, Arabidopsis thaliana
tctagaccccggaaatttacaggatgagtctaaagcgttggctttgattctgtttggttgttggagagattttgttggtgaatttgctcctgtacggttaattggttttcagcagtacggtttctcctcatgatctggaggtaagcatagttcattttaggtttttgtttgatgtttttgcttcggagtttctgttatgaaggctaaaaatttgatacttaatatatgtagtggttgcagcatagatcgttttagtaaagttttgtttctatattttatctgaggttatttggaggatttgcaacaaaggttgctgcttgttgattggatataatccaaaggcaaaggtggttgttagcttgagatcaaatgcaaggtaatttatcattttgtatttatttgctgtgatcaatgctttgctgttatttactgtgataaatgcttcttggttgatataaaactgttgttaggtaaacgtcaattgctcttgtaggtaaacgtcaaatgctagttcttatagcatttaaaactgtaaaactgtgatgattgcttggtaggctaatttaaatcaatagtatttagtgtggcattgattgtgagctgtctaacaaagccataatttgcctttaaaacacaaaaccgtaacctttgatttttaaaacacaaaaccgtaacctttgatttttaaaacacaaaacctgaaacaaagatatggattcaccaaatccatatcatcatacttcaagctttataaaccttttgaacagtcaagatgacagtcacattctcccaccaaatccatatgaatgctttgaacttggatcagcaaatgtccctgtgtatagcactgagtggtctgatgatgatccaagtgaagatgaactaccaattgctgggaagaaagggaaaaaagggaagaaagccaagaaaccaaggaggaattggtcatcaactgaagatgttgttctcataagtgggtggctgaacacttccaaggatccggtggtgggcaatgagcaaaagggggcagctttctgggaacgtatagcagtctactacaactcaagtcccaagctcaaaggtgtggaaaagagaggccacatatgctgtaaacaaaggtggtcaaaagtgaatgacgctgtgaacaagtttgtagggagctacttggctgctagcaaacaacaaacaagtggtcaaaatgatgatgatgtggtgtctttggcacatcagatcttctcaaaagattatggctgcaagtttacttgtgagcatgcttggagggagcgtagatatgatcaaaagtggattgctcagtctactcatgggaaagcaaagagaagaaaatgtgaagctgactctgaacctgttggcgttgaagacaaggaagctcgtcccattggtgttaagcggcaaaagccgcagccaaagccaaaggcaaagccaagctaagtccggtagaaggtgaagaaaccaatgctttgaaggagatacaaagtatatgg

SEQ ID NO: 49467 - DNA, 475 bp, Arabidopsis thaliana columbia
atcttgggaaatttgggggcttattagacagagaagaaagaagtactaaccgatcagtagtgttgggatctttctcatgtcgtgaatacaaaactcttcgaaaaggattggtgaagaagtggtaataatagagaggaggacccaagaactttgttgagcttgagagtggacgacgaagactttgtatcttctttctttttttctcaaaaccataatcggaggaaacagcgacacgcttttgtttgccaaatgtatttttacttattatttagttttaataacattattgtctgttggtatattatttaggaaaaattatatcctatgccatattttttaaaatccttatataatgtgtcattatttttctaggtcttacaactcatgccacatttagatgggaaatgtcaattttatcctcaccatgtctactatatattatctctatatcctcgagatccgtgcattttgacca

SEQ ID NO: 49468 - DNA, 563 bp, Arabidopsis thaliana columbia
ctgaagataaacccggagaagaaacaaatcgattcttttgtggcttctgactttgacctcacaggctatgatcctcacaagaagatagaaatgaaaatggcggtttagttctcatctcttactataggatatgaccaaaaggagactaccgacaaattgattgtgtaaaatttatgattgaatcagatgaatgaccatcaatgtatggactcatattacccttttgtgggtgataacttgtcataaacatgtgttggaatcctctagttccacatggttctagagcgatttaggattttatacttcttttatatattgtttcctatttcaactatcgaatgagaactttgatgattttggccaatttatgttctttttggttttaagtttgtctacaagatacataaataatctttctaatatactataactgttgtggtgttataattggtatacaactataactgtaatttcatatgcttgtgtttaaagtaattgattgatgacacaagcaaaaggtgtggataatgcagagtaactacactatacacttgtggccttat

SEQ ID NO: 49469 - DNA, 517 bp, Arabidopsis thaliana columbia
accatatcttcgtggagtgcttagaaaatcctcttgcatttggttagtgttagcagcaataaacacatttctcccaatttttttgttaagttcatttatcatttgaagtagctgaggatcatatagagatgcagctcgttgtagctcggccgagcatcttccattcgacgtacctgatctcgccagttcggccggtgcacatcctagtggtccagctcctgtcactagaactcgacccactccaagtgaatttaacctctacaaataacacacaattaaattgtttgcaacaatactcaaatagtcaaatcattgcaagagagtgaaagttcttgaaatcatatgagttcaactgcctaagactatatcatcattccaattcaattttggtcttacaataatgaagcaaattataataagactgttaccacttaccaatagtatttttttgtattcagaaattaggagtcggacgtaatctggtagagtgaattggcgtgatctagcggaatatgga

SEQ ID NO: 49470 - DNA, 573 bp, Arabidopsis thaliana columbia
cgaacattattactaaatcatgtaattgattacaaaaatacatataagtaggtcaactaactactaataataatattttaatttcataacaaacactacattagccaatttgattattaatatacaattttatattcaagacctagcaatttccttttgattatcttactttctttttccagttaccaattatgaaattatatgcccaatcatataagatatatttataattatctgatgtgggattctgactcctctgattttttctttgtaatatatttatatgccactaaacttaaaatagatgtatattttgtccttcatataagcatataacagtcttaaaaataagtggaacaccttcttctttttcatgtcttattttggaacctctttcttaactttgtaacgaaggacaccacgatggaacctgggctgcttcgagtgcaggtgcagcaccgtagatgaaactttttaagtttgtatgatgtaaaaacaaaatgggaaacgattcaaagaacatgttataatgcgaaataggtagatgaggccagagattgttgttatgtaaaa

SEQ ID NO: 49471 - DNA, 604 bp, Arabidopsis thaliana columbia
actcctcaaaccacaatgtgcttctgttcttgttttgttctgtggtatgaacatgcatctaaaacctgaaaaatgaacatgcaggaccaaatgcgggctcttgatatgatccgggaggattcagaactctctgctttgacactgatggaggctccgctggttgatatggagatcagaggtgtccctgctctgcgcttcttgggcgatatcatttggaaataagatcattacatattatcaccacaaggatgaagaacaagcaggttcacttgtatgagatagtgttggttaatacattacatagttttaggtatagatgttgatgtttgtctttgatgggtttggtctttggctaaaaatgaatatcgacgagtttttcaaactgttaacagattcagtatttgctacattttggtgggtgtaaaatgttcagtgtaaaacatttagagcttttaaaataaaaaatatagcaattcttggggagcaaaccgcaagatatttacatcgtaatgtgaagaataagacctaaaagtaagccattgctttacataaataaagcagcaaggcttcaccttttacacaaccaaaaggagatttttgattt

SEQ ID NO: 49472 - DNA, 408 bp, Arabidopsis thaliana columbia
tacgagcatttgattatctttctccaagtggccaaaccgagaaatacgtagaggcaaatattttcagggcacacaactcaaatgcttgtataagacacccttaccatatataaagtactttctaaaccagctgatacccttagtttaaaatttccatgcgaccgtaactcggtaatccatttcttttaggactttgtaatagcgtaatagcgtatcttaacgtatcaatgtgatacgctccaacatcaatcacatttattgtgaattgattctgatttgtatctctttaggaaagtagatatcgtctcttacctatataacaatgtagaggctactgtgaatacaggacaagacactttttctcatacatcgatctctacctgttcatggtatcagagccctgacaat

SEQ ID NO: 49473 - DNA, 430 bp, Arabidopsis thaliana columbia
tgtctgcattgaagtatcatcacagtaaaattacaaacagtcacacacctttactaatgaacatcaaaatagaacatcatgagatgttttatcattactacaaagcatatgttaacctaccagatcaagaagacgccttctcgcttcaattttatgtttctcatgactctcattgtcatgatcagagtaaccagaagatattgcgagtagatcggttgggctttcaccaaccatccattccatggtcaaaactcttttgcgcgttagatgctgatatacttttggaacccggatataggaaaatcgtgcgtgacgttcttcaaaatgaagtacttcggtcagtcaaagcatactagatacttgctgtaaacttaaaccacaaaattaaggaaataacatagatactagcacgaacagagagtacattgtg

SEQ ID NO: 49474 - DNA, 566 bp, Arabidopsis thaliana columbia
ggtaagactatcctatcagtagagttgtattgtcatttgcatctcgttttgttggtttttctgagtttgtctatttcgtttgatgttttttgtagtgggtccaatgtgataaatgtcaggcctggcagcatcaaatatgtgctctatttaatgggcggaggaatgatggggggcaagctgagtatacctgcccatattgctatgtaattgatgtggagcaaaatgagagaaagcctttacttcagagtgctgttcttggagcgaaagatctgccaagaacaattctcagtgaccatatagagcagcggttgtttaaaaggctgaagcaggaaaggactgagagagccagggttcaaggaacaagttatgatgaggtaatctggcggtggaatacagggttttaaagtctcatgtgattttgcattgagtcctatcttctattgtttgttgaagtgctacttcactggaaacaatagattgaagcttactggttggtcactgattgtttaatttttcttttactggcactaacagattccaccgttgaatccttgtggttagagggg

SEQ ID NO: 49475 - DNA, 495 bp, Arabidopsis thaliana columbia
tcttgagaatggcgccaaaaccgctgtacatgaaacagtatacattagaccataaacaaagtgttaatcctttgagttacatacaattctagctgacaaatcacctgatcaatgacagaactaccacgatgagggccacatggggtttgatcaggccgatataatgggatgtgggtcaataaaactctaggatgtgactgtgcgtctaaaaaagataagaaaattttatgtataagcttcacaaagatagtatatacagaagaggatgcagctgaataacacacacaccggtggagacattttgtactaacttccaaacttctgaggccagatcctttttagaattcctgcaacatatacatcacttttcagttacagatccttggtttctctttgaggagaaattctaagcatgtaaaacaatatcttaatgatcagagcaaagtttgtaacaaccatcgatagcttgggcatcaatactgatgaactcaacat

SEQ ID NO: 49476 - DNA, 445 bp, Arabidopsis thaliana columbia
tagactagaggatcccctcgactttcttacggaaacaaagcatagaggaatccccttggacacctctagatggtggccgtgatggagaagctaaatctgctatattactcctctctggtattctttcggagtcgtgcggttttggaatgtttggtctcacgatcatatccgctctactgtcaggactaccatcatatatcttcttttcaatatgtctcggaccatcccgtgaatcagacctaatgctttggctcttttctatggaccgagaagatgaacctattcctgacttcaatgccagggaatcattgctacgtcgatgatgatcgctagactgttatccttcaccgagaatatgatccagtttccgcggtaaagtcttgtggccaccattttcaaaattggcatcgagagaaggatcagcgcgctctttcgctttcaaaga

SEQ ID NO: 49477 - DNA, 373 bp, Arabidopsis thaliana columbia
tttttataacaatatctgtgaattattctaattatcgcgagacaattaagaaaaccgcaacatttaaatatgtcttttttgcctcaatataaatactaatgacagatattaatattcttagaaaaacatgagtatttgacagattcataattacataagatgcttcagtttcaactagacgaataaagaagtaactgtgaaagagcgcagaagagtcacacattgaaaacaatggcggcatcttcagagcctccggttgttctccttcaccgaccaccgtctctaactttcatggacgagattctgtgtcgtgaattccgtactctcatcaccgacacttcctcatcgggatcactcccgagcttcttccccg

SEQ ID NO: 49478 - DNA, 590 bp, Arabidopsis thaliana columbia
ctttccatatacttctctcatataaagacacgggaaaacgactcttcacccaattcttgcttgatttccaaatgctaatccttgatgataagaaaacgtataaccaaacaaaccaatcatattcatcaattgatttaatgccaaaagttaaacagtgtcttatgctatgtgcaaagaacacatgcatgcaagttgcgttcatactggcaaaaaatacatgtttgcaaattgcaagttgtgtaatatgtcaaattatatacagataatttttatttttatcacaaactaagttatttttccttttccaacattcataaccccactaaaaagggttggattgaaccttaacgacaggtcatggtggaacacccccacccaacaggccacattttgattataaagaaaatttactctcgcctatatataacctcctcaacattctatgaaacagcgtattacaaaatgataattttatctcatttcacttcatttgttacgtcatccaatttccgtcagaagaaaaactgtgataagatcgattccattcaactagttgggtaccacaatgacaagaagtactactttgagga

SEQ ID NO: 49479 - DNA, 434 bp, Arabidopsis thaliana columbia
tagtattgtttgattccctataaaaccaaaggttgatgcatttcatgataaaactaaaacttaaagcataaaaatggcagaaggaaaaacttacttcaagagtcaattcatcaggcttcacaagaatcctcacaggatctgtcataaacttttctgtcatctccaaaatctcttgaggaagagtagcagaaatcaagcaaacctataaaccaaccgtattaacttcatattatcatagaaactaggatctactaattattactactgtttaaacaattgagatcgaaacctggatatcgtgtggaagagctctgtgaacgtcataaatctggtctttcaaacctttactcagcatttcatgtgattcatccagaaccaagagtttaaccgctttagtttgtaagcttcctctctttatcatatcgtaaactcga

SEQ ID NO: 49480 - DNA, 438 bp, Arabidopsis thaliana columbia
cactgcgtagagactataaaccggatgatccccatgatttgggtcactcatatacgggctaatatcgagaagctcgggaaaatggatgggtttgctcagcttcccaaagttatcagactgcatggaaaaataaatcattcttctgagttaacccaacaatagtagacaccttccaaactaacgaggatgaagactctcacctgaaaacgtttcagcacgacagtaagaatattgggtccttccaatatcatcaatttctttttggctttctggtaagatttacatctgtagttgtaaaaaggaaagccaaaggcaaaggaattagtagtagttttttataacgtatatattaagtttccaagagaaaaaatcaagtacctgccacagaaataccggttcgctccatctaggacgtcgtatgctgtgaattgagcaagt

SEQ ID NO: 49481 - DNA, 538 bp, Arabidopsis thaliana columbia
cgaagctgtttcgagttccgatgatcgtaagatcgttgcagatactcccgattttatagacgaatcctctctagtcatcagaacaaccactggagtccgaatctcagctctaccggcggagaaagccttgttgactccgatggatctaactcggaggttacgcttccggcgaaagacgaggtaattagtgatggttttacttgtgtgaacaaagagattgtagaatctgattcatttagggagcagaatctagagattggagaacctgatttagatgttgagaatcgcaaagaagcgatgattattgattcgatagaaaattctgtggttgaaattgtttcaagtgcttctggtgatgattgtaatgttaaggtagaggtagtggaacgtgaattgcttgttgagaatatggtggttgctaaagaagaagaagaaatgattgttgattctatagaagattctgttgttgaaattgtttcaactgcttcgggttgtgattgtaatgtgaaggttgaggtagtggaccgtgaattgtgtg

SEQ ID NO: 49482 - DNA, 560 bp, Arabidopsis thaliana columbia
agtctgcatttcgccattgtagagttttacctcttcttcattgttttagtttccatcgaattaattattcaaaacagaacaaaacaaatattcaaaccggaataacccggtttaaaccgagaaacttatttcttttccacgaaaaaacatgcaacgacgattcaaagcagccgacacttttgttagacctggttatgtcgatcttgcaacgcttgagctttgctgattttcatagagccagatgcgtttcttcagaatgctattcggcttcgaaatcatgcataacaacaactccatggatcatcacgattccatacaaatattcgacaaacagcaacaatgattcatcatgtaagttgttcgatcctcgtgacaatagttgttacacattaagagatctcgggattgatatggctacgagtcgttgtttggcgagttccggtagatggtttcttctgttagaccataacctagattttcaccttttgaatctgtttactagagagaggattcttccgactcttgaatcatcgatggatttcggatggacttatgagaat

SEQ ID NO: 49483 - DNA, 512 bp, Arabidopsis thaliana columbia
cccataaataagttatgttattctaatgtatctctctttttccacacaaatttttaataaagttatgagttacttctttctaagtagttagtatgagttttccaatcaatctattttccacgttcagttttccaaattgtattgatcctgttatagtgtaattacgcattttgtaattggccatggtactacaatactaatactatcatgttatctgcagacttcaatcttttatttttaaaaattaattataagcatttgtaatattgatgtaattttaatacaaactgtttattaatttgtttgaaaacttatgtggacaaataaaattagtatacagaacaaaaaaatatgtttcaataccaaaaaaagttcactccctaagcttttctgtctcttaaggataacatcctggatgaggtctctcgatgattcccccacatacaacataaccatataaagaaaaaatcatcagccaagtgaagcatcgggaacagtagtgtgacctttgg

SEQ ID NO: 49484 - DNA, 575 bp, Arabidopsis thaliana
ggccctttaggaccaaaggatcgcattcgatgcaaccatatctcctgctcgtttttctgaagaagaatacaatagaatgtaaataaacagcagatacaaggagagggagagacagagacagatacatgtgaatgagcataaacagaaattcaagactcttacgtattttctaatgtgacagttctgaaattttgcttaaaagcaggtcggatgtcaggtggaccatcatcaaactgttcagctggaggttgtatatatgcattttccatcagcagctgaatcaaacgtgcgccgacctagaagcacaagagtcaatattattaaatcacagagacgagaaaaaaaaagagaaggaaaataagaactattataaagctctgtgcattgacaagggtggaagtataaacaaaccttcacttgagcctcttgaccccatggcttgaatgagtcatgtttcctcactaatgcttttacttgcctcaacttatttttttccatcagtacagtaacttgttcctcgccttttccgtttctttggccacaatttcttctgaaacattctcagcttctgtatt

SEQ ID NO: 49485 - DNA, 574 bp, Arabidopsis thaliana columbia
ctttgactttcagacggagaagcaaaattgcttgaactttcgctttgatggatcaaactagtcttggaacaataatcaaaatccattcgttgccatcatatgcagcttactgtatatgccgtcttctccttctcgctctatactcagaggtctcactgtatccgaaatttgcaagtttattcctcaatcgtggaaacagctgccgagacccatctcagaaacttccaaaacccatgatgatgaatcagttccacaagtgcttttcaattcatttagacattgcatttcccatggtcaattatatgaagctttcagaactttctctctacttcgctaccagtctggttctcatgaattcgttttgtattcatcagcttctcttctatctacatgtgtgggttttaatgagtttgttcctggccagcaacttcatgctcattgtatctcgtcgggtttggagtttgactctgttttggcccaaagttggtcactttctactctgcttttaatctcgttgacgaagctcagaccattactgagaactctgagattttgcatccttgccgtggaatgt

SEQ ID NO: 49486 - DNA, 567 bp, Arabidopsis thaliana columbia
cgtcgaaagccaatttttacataattttgtgtctgcataatttaactccattaaaaaagcatggagaaacttttaaataatttaattatgactttctaagtggggtccagaccataaaacgctgcgttttaagtgaaattatcggttcaaccggccggtccggttctaagaacatcggtcgatctagttgctcctatatgaacaacagaagacctaaaccctaactccccccctctctctctctctctgctccatttctctcactttcttcacatctctgaagctcttcgtcacgcatctacaatggcatcgatgatggtaagtcgcatctacacacactttctctctctatctcactctctgtgctataaactgactaacgtgccactactttggttttggtttgatgagcagcaaccgcagatcatactgctgaaggaagggacggacacatctcagggcaaagcgcaactagtaagcaacatcaacgcttgcactgctgttggagatgtagttcgaccacgctcgggccacgagggatggcaaactcatcacgacgataaagga

SEQ ID NO: 49487 - DNA, 555 bp, Arabidopsis thaliana columbia
ctctagactataggatccccattgttaactttggtttgaatcttctagattgaataagatgatgatgatgatgattcaactggatttgtctggtttcccactagcggtagtaccaggctgtggttttaactggaaaataccgctcagtcctcgtgccttagcaagttgttcaagctcctctagcttgctcttgagatctgccacttgcttttctagttcttcatcttttattctcaactcctgtaaaaccatgagattcacaaatctcaacctaatcaataatcaaacctcaacatgatatttctgagtagtctatctcgttagaacaagcacacaagtttgctcggttcttaactaatgaaatgctttcttatttagttgttactgcagatttcaagttaatgtgagcatacattgaatatgttgataattgttttccatctatggcgcaagaagtaaccatatttataaagctcctttaaataagacggatatctcacgacttcaaggaatgagaacaattctacaggctgcaacttttaggaagcttgagtt

SEQ ID NO: 49488 - DNA, 516 bp, Arabidopsis thaliana columbia
cgatttgattctccgactaatctccttatctaactcttcatttcctccaacttcttccaattcctgaatcaccaaatccaaattagcaaaaaaagccaacaacatgaagaagattaagaagaatataaacaaatcaagagacttcttaccttgggtccaagaaacagtccatatggtacaccattgaacttgtctgtgtgatgtagctgaaacataatcatgcacgatcaataacaataaaaatatgattattaagatactaataataataaaataaaatctattttgggaaagaaaccgtttgtatttacctggtgagcggcggcgacctttcggaggtaagggacgtcggcgatgggacctacagggaaacgcttgtgcacgagaccatcgtggacaaacatgtaggcgattccaaacaccgttatgcctaacccctgtttcaaggacgagcttaaaattaagccaccaggtcatttgtgttaatgcagccacacagtcatttgtcatcacatg

SEQ ID NO: 49489 - DNA, 570 bp, Arabidopsis thaliana columbia
tgaagacccactaaacacatctctatccgggaaaagaagatatctccaacctcaattccaggaaccgtcccaactctcttcttcatgtttgtccgcaccccattgctcatcagagtacctgctgctttagaagtagcggactttgtgaattctacttggctgagccgcctcctaactgcatcaaaacgcatcaatacactacttactaagtacgcatttccatcttctcgctctgctgcactgatcccactgtcaaaatctgaactgaattttttcactacctgaacatctaagttaggctcattggccacagtcttcttctcttttttcttcacactagtagttcccttaggtcgaccaacacctcttttagttccactggagctgctggggccatttgttttagtaggtgttctatacgatcgaagaggtggaacaaatgatggaataggcgtgttctgagtttggttgagatctggagtatcatgcgttggttgttgtgcccaaatgggaagaaagaagaatactcagatgaggaaggccaaaaggtggacaaccacaaaaggtgga

SEQ ID NO: 49490 - DNA, 474 bp, Arabidopsis thaliana columbia
ctgcttatgcagacattttcaatttcactcctccgtcactcttctccgttcctccgtcacaccgcgattttacacggcggagttggagtaagattcaaataccttcgcagctacaatactctctcagcaagacgagataatcccgatgtctccagaccacctcatccgagtctctctctgctctgagcgaactcaatcggtccccctccctcctgctccttgtcacctgttctctcgccggcgcttaaaccttcgctgttagagtctccagctattggtactgtcgcacacgctcaagcgtcctttatgtgcgtcattgttctagatgttgctacttctgtgacgtgtgctgttggtgctgcttctcccgcggctggtgttgccttgctttgtgtggtgtgacgcgtgttgccgggcttccgatggtgagtcttcgttggcgatacggttcttgttggctttcttgcttgggtt

SEQ ID NO: 49491 - DNA, 1345 bp, Arabidopsis thaliana columbia
atatatatataagactattttaccgtaatttattgatgattgcagacaatacaagatatctctagtttacaaaaatatcatcaacaatattcgagagaatagttcttttgagtatttgcggatgccggaaacaacaacacttagaaatcatatttagtaaagaattatgtttagagtttagactttatagcttatatattatattgagatgatagatgattataaggaaaaacataaggaagtcaacttatcataacgcttcattgtaaggatatgcgaatatcaaaggcggaaagatttagaataagtgaataacccataatttcataaacgttagagcatttttttaggaaattattttaagatagcaattatttcatttggtgagtcgaccacatggaatcctcaagagacaaatgaaaaataattagactttttgacgatttttgccttcattgatacgtacggcctcttaggctttttagctatttccaatgccaactgtcaacattcgtatctctttcgccattttagtgaaattccacaaagtcattatctttgatgtatataacttgccaggctgctactataccaaatagatttataaatattatttttagatttcttttccatactttttaattctcaaacgaaactttatgcaaagttgaaataaagttttcttctgcatttcacttaaaattataatttgtcaaacagaagtgcaaacattgattttctgactgaaaatttttcaaccttacaaaagttgcttgaactttgtttagaaaaaagaaaatactaatacttgataaaccctcacggttcctattttaaaaccaaaaccttcaaatcaaagactcaagaatcaattcataaatgtgtgagacaaaactcataacccaaatatggtacacgtacgtatgaaacgtacttaaatgctacaaaagaataatatgtttagttctcaaatttaaataattttttccttctatcattactaatcaaaattacaactcatatctatactaaatgctattatcagctaacaataataaaattttcacaaattggtaaagtccttattaacttttacttatcttattcaaatctcattattggacccacctaaccctacccaccatatgatattggtatcccctctggcctctatataaactttgcatttctctaatctccaacttacaccaacaaaacacaacaaagaccattagccttctctcccactcagagtctttcatctcactctcgccttaaatgactcacaaccattctaatgaagaaggctcattggaactccttgcatggagtacagcaagagaca

SEQ ID NO: 49492 - DNA, 538 bp, Arabidopsis thaliana columbia
gaggataggctacccacctgcttctccggcctttaaaaacgtagtctcgtaagccgccgtctcgagcccttcttcgagccgtgtcacagtgttgaccacaatgtcgtgattctcagagaccaaggcgtcgcggttgtaccgtctggttaggttacgtgcgaaggaaggagtactgctctggttattggaatctgacctattccgggaagcttggatgtcttgaagaatggttttgaggtaagcgtaatctatataagcttcttgccattctgggatcatctgagacacaaactctttcccaaacctcatgattcttcaaccttcagatctttttttttcttgctcgaagtctacagtcagaatctcaaattatgaatcttggcctctctctgtctttggaacaaaagttggaaagaagaatgtgactttttgacttttgggttttgagtgatgctgaaagtttttctagagaggtagaccaggtcttgagtcttaacttagccaacaacaatatgaattcgttttcgtccacaatttt

SEQ ID NO: 49493 - DNA, 541 bp, Arabidopsis thaliana columbia
caaaaacgccggcatcgaggggccataaatctctctcaggcacgttcattattcacgtggtatctaattacacgtgcttgacagtgagtcatagtacagaagaacactaaccacacacaagcagagaacatctctctcttcatgccaacaatctccatggttggcttgaataatgaaggatacgatattaaaatatctcataacatgcaaaattagacaaggagaaagcaacttaataggaaagagatgggccacgagccatataatattgtgatgggcttaaagtagatttagctttgtgagattaagattaatgtaccctaaatcctatatatatatatatgtagccacaaagataaataacacaataacacagaattttcagtatctaaacttaaattctgacatggtatcagagctttaggttttttaggtttacaagttttaaggtttttgttttgattccactaatatgaaaaaaaaaaaaattgtttttagtttttaagttttgttagtcgttagggtttgttgttgggttttg

SEQ ID NO: 49494 - DNA, 620 bp, Arabidopsis thaliana columbia
  unsure (1)..(620): unsure at all n locations
agtcttcgtgcttctcaaagctttgatggtgttgttgaagtccgtagagtctttggattggtatcttctaacaaggaaacattacataggattttaagattaatttgcgattctagttcttatagtcaattatacacatgacatctagtcatatttgactccaaaacactaaccaagcttcttcttacttctcaaagctttgatggtgtagcccaagtccgtatgagtctttggctttgtatcttctaacaaggaaacactacttaggcttttaagattcggttgcggttctagttcttatactcaatcatacaaatgacatctagtcatatttgactccaaaatactaaccaagcttcttcttgcctcttatagctttgatggtgtagtcgaagtccgtatgagtctttggatgtgtacttctagcatggcaacacaactttagcgttttggttctggttgcagttctagctcttatactcaatcagtccgatgtatcctatctgtactgtttttagttatgttttagatataggattctaagtctttttgttatgtttagaatgtttntagagtctgacagggtatgttatggagagggacaacattggagatgagga

SEQ ID NO: 49495 - DNA, 638 bp, Arabidopsis thaliana columbia
cacacgtatttgttagtaatgcgtaagatgtaattttcccaaagattacaattaagcaatttgacttttactaaagacaacaaggccttgcattgttgaaaaggatcagtggattgtaacaaaaactcgcaagataaagcctcaaatcaaagtaagaacaaacgtcgtttttctccaagttgaatataaaaccaccaaaacgtcgtttttgcttcattttataaatacctcatttaactatgatcctccgagtcctgttgcttcagtttcaggatctcttggagaagaaggcagagactatgtttggtttgattctgagcgttgacttccacgattttcagcttattttgcaacgccaaacgataggctctgttagtataccatgatggacgaactgttttggacattgttcatatgatttcaaaaccttacaatagactgaagggtaataactctggtgaaaaatggatggcctgcagagcttttatcgatacgcaacgacacttagctttagactttaatggcaatcacgagtgtatattgatgatatgagttttggagttggaagatatgtggtatgttgcatcgagagatttgtaggtgatctcatagagttggagattgttaaccttaacaga

SEQ ID NO: 49496 - DNA, 329 bp, Arabidopsis thaliana columbia
caataaaaattaattaaaaaaaaattattttctctctcttttctttatttgatttcttttttgcttttcttcccttccctccttcttcagtcccctccgtttgatcctctcgcctctgtccccttttctccttgcgcgccggggttcgccatcgcttccctccgctttctttttgctccacagccactgccaattccctttgtgcccccttcgttttccttttccccttcccctctcgctttcccatccgtccggcccttgttgccccgctggggaccctttccccctgtctcgatctgccccccttctgccccggttttcccccctcc

SEQ ID NO: 49497 - DNA, 508 bp, Arabidopsis thaliana columbia
aggtaagaaaacgaattctttaacttttctacttaacccccatcggcaattttctctttccctcaccatgaatgatcatcaaacattagaaaacctaaaagaagatgccatagacaaagcccacttatcttcagaccaaagatgtacaaaatagtcagccatttttcattttgttgcacctctgaagaagaagcagaacaatactcttactgcaactaaagcctttccaccttctagccagcgccgaagtaaccaaaagaaaaaaaaaaaaaccaaagagaataaagaaaagaaaagagaatgaaaaactatcttccatctgaaaaccccgaacaaaatctgatcacgagtcgggagctatgtcctcagttgcttcttatatgataggcagcttctgcagcagtgatggcttgaacttcttgcactgtttttataaaagatgtaaagtaaaacgagttaacaatgatgagagaaattaaaagaaacgatggaagagtgttgttgtgcc

SEQ ID NO: 49498 - DNA, 612 bp, Arabidopsis thaliana columbia
tatgttttccaagcttgaatcattcaaatctgtcaaaactatcaccgaggataacgccttgtctgttccttgggtatccatctcaacaaaagggtatcgatgccttgatttaaaaacaaacaaaattattatttctaggcacgtttactttgatgaggatacgttccccgcagctaatcaaaatttatctcaagtttcttcgtacacattcctagacacagttgatgatccttctccattgttcaaggaaattctccaatcaccactacctcaaaatcaaccaccaccacctcaaactctctctctgtgccacctccgctacctgtgccaaacacatcaaatgtgccttctattccttgttactcaatgaacacaagatcaaaatccgacatcactaaaccaaaaaagattttgtcacttgtcaccacagccaaagcgcctcttcctaaagctcataatcaagctttattggaccctaattagaatccgacaatgactgatgagtatgatgctatgactaaaactaagagttggaatttggtgcccgacctcctcaggtcaatattgttagatcgatgtggcttttcaggcacaaatatgatgcagatggag

SEQ ID NO: 49499 - DNA, 560 bp, Arabidopsis thaliana columbia
cttctttattatattcatcttgttccattttgaagacgtgctgcccggaaaaaaatgtggatcactattagggacaaatcaggctgaagaatggcaaccatctgaagatgaacaaacctcagacaaacctgattaaaatgttgctgaagtttctcattcgtcaagtttgatggcaaaattgctcaaaactgcaaagtgcaatacaaagcatttttcaaggaaaacacaagcaaaatccatttgatatattcactgcccttccatttcaaatatataaataagaaaggagagcaacatctacgaccctttccattgcttactaaaactagagatccataaagaaccaacaaagtaaacaagaggctatcatgtgaaaatgctgaaccttatattcttatcaggctaagttccatagcatttctctaaagtggtcccattcccttatcaaacaaaaggcataccgcttaagcacctgtttgtcttaaaactctcaaacccatatatatccagcactccaatcaaatactctgagtcaggatcttgtccaattgaatcattga

SEQ ID NO: 49500 - DNA, 489 bp, Arabidopsis thaliana columbia
cagagtgagcagaagcggaggaagattgagaggagcaaagaggagagggaaggggaagagaaaaaggaagagattgagccggaagctgagaatccggagacggaagcttggcttaggaagaataggaagagtccgtggtcgaggaagaaggaggtggttcagggagagttgacggaggagcagaagaagtatgcggaggatcatgccaagaagaaggaggagaagggacaacaaggtgaaaccaaaggagagcattatgcggataagagtaccttccatggcaaagaggagaaagattatcaaggaaggtcttggattgaggctcctaaagatgctaaggcgaacaatgatcattgctacattccaaaacgtttggttcatacatggagtgggcacacgaaaggtgtttccgctattaggttcttccaaagcaaggacatttgcttctctctgcaggtatggattgtaaggttaagatttgggatgtgt

SEQ ID NO: 49501 - DNA, 602 bp, Arabidopsis thaliana columbia
tatcgtcacaatcggctctctccttcagttacgttcttcatttcccagactctcctctcaattccacttctccggtaccctaaactcaattccgatcaaacacctaagcacatccgccgccgcaaacgattaccaccagaatcctcaatctggatcaccgtctcagcatcaacgcccatatccacctcaaagcttcgattctcagaatcagaccaacactaatcaacgagttccacaaagccctaatcaatggtctactcaacacggtggtcaaatacctcaatacggtggtcaaaatcctcaacacgggggtcaaaggcctccatacggtggtcaaaatcctcaacaaggtggtcaaatgtctcaatacggtggtcacaatcctcaacacggtggtcacagagctcagtacggtggtcagaggcctcaatacggtggacctggtaacaattatcagaatcagaatgttcaacaaagtaatcagagtcagtactacactccgcagcagcagcaacaaccgcaaccaccacgaagctcgaatcaaagccctaatcagatgaatgaggtagctcatcctcctagtgttgaagaggtgatgaggt

SEQ ID NO: 49502 - DNA, 897 bp, Arabidopsis thaliana columbia
ccaacacatgtgtagatctcagccattatccaagattccatttcaatcttaaccatccaagtccaaactgttcaatctcttaatttctttaatcaattcgtaatttggtaaacttttgccaattagtttaacaggtcacaattcaaaactggcccaagactaaaacacgaagttgagaaaatttactactattttccaataccaccaaaatttgcaaaatggtatctaactacgtaaaactaataacttttccttgtacttattttaataacagtcaaaatataatttatttcctttatttcaaacatttatttcctctttatggttcaaaattattaggagtatcacaatatatttatgtatttaatttctctccttatgttttgtcaaacacaaaaaaaaaaatatcttgtataaactgatacaaacccgtttcttatttctctctcgttttctccaaaagacttatcaagccgcaccatcacaaagcttgagagaaaacgaaagactcgttaatcaagaaaactctcagccaaaaccttcaaagtcaatttgattaaactaaacacatcaatcaaatcccctcgtttctcaaaacccatatctccttttcttctctcaccttgttttagccgtaaagtaatcaccttttcaacttctcaaaagccctctgtttctctcatctccctctctctgacgatgaaagagtattggacatctttggcttctctactcggcgttttagccttttgccaaagcctaatgaattctgtattcccaccagagctccgtttcgccatctcgaaactcttcaacaaattctttaaactcttctccaccttctgttacttcgacataacagagattgacggcggtaacaccaacgagctttacaat

SEQ ID NO: 49503 - DNA, 490 bp, Arabidopsis thaliana columbia
tgacagagaagagatttcgtcatgtttccttgggattttcttttaagaggttgcaagtatggaatgttgaatttcaaggccgatctgggttgatgaggaaaagattacgatatcttttttgggcttttcttcagattggatctgtctttgattggcgatttggattgatggattttatcttttttccctttttcttcttcgttggtgtgtggattcttaggagatggtttaggcaatgttcctgctagttgattcttcggagttgtgcgaatcttaatttggtatctccattggcttcttttgattttgtttccatggtctttcagagtcagattgcgttttttatgattctccgcgattcgttcagagatatgattgcaagtttgaaatcctgctctttgtgttcacggggattttcagaacgttttttttgggattgtgatttggggagttatgatggtgtcgtggagaggctgtataaaaggggaga

SEQ ID NO: 49504 - DNA, 465 bp, Arabidopsis thaliana columbia
  unsure (1)..(465): unsure at all n locations
cctaaatattgatttcaaatattaaacgctcgaacggtacgatccctccgtcaccccagaatgaaaggggtgatctcgtagtacttggtctgtgacaatacctagttcggtatccacaatagagattacctcagatcccaagggaatcacaagctcttcatagctacagaacattttaaccaaagtgagatattaattaagagagttgttagagttatgaaaaaggttagggtccaaggagaagatgaaaatttaaacgctgagactgattcttggtaaggagacccaccaacgcgatcagctaactgcataacataatcaataaagaaacatttcagaatcacgatatatgtgttgtaatgagagagatgcttcttancaggaacattaatgttaataaagctcttgcatacgggttgcccatatgttatgtaaagggaacaaatgggccgaataatattaatg

SEQ ID NO: 49505 - DNA, 549 bp, Arabidopsis thaliana columbia
gattttattattcatgttgaaattctggacgaactccagaaaattcttgaagatattaaaccggtttaaatactcggtatcatcagagtaaacgcggttaaatcgagcaatccattgctcatgtttctaaatggcagaagcttcaaaaaagctaccacgagatgtagctagcgaagttctgtaacttgaagaaatagttggaatgaagatggtagttggcgccattccctataggtaatgtgtatgggcacaatttgaaaatagtgtcggtagaaataatcttgtagtgcgagtattttgatttttgtatcttggtttgccgggaagcgggtatgcgaaatggtcttgtgtggggagttgtgagtgaagtgtgtggtgcggtgttgagtgtgtggtttgagtgtgcctggggagtgggaccaggtggcgtgggggaaacgagttgcggcgttgttggtgttgggttctgtttgccggtttttgtgtgcttccgccttcgctcggggttggtggtcgggttttggctcggtgagggtttgtttgtgttgg

SEQ ID NO: 49506 - DNA, 537 bp, Arabidopsis thaliana columbia
ggatccccagtttccaacgcctgctcttccttagttgtttctgtgacagatgaatcttgcaaagcatcttcttccttagttgtttctgtgacagatgaatcttgcaaagcaccttcttccttagatgtttctgtgacagatgaatcttgcaaagcatctttttccttagttgtttctgtgacagatgaatcttgcaaaagcatctttttccttagttgtttttgtgacggttgaatcttgcaaagcatcgtctttcgtgatctctgatgtgatgttcgaatttccaggagtggagaatgaactctggacatcattatcgttgttcagagacatagctgtttcttcagctacaacagaactagtctccgagacctgcacctgattggattcttcagagatattgtacagttccgaaagttccttcatagcatcagcaagcccatccatgttattgcgacgagcatacaatttcaactcttctttcatcttgtcaagtggctagattcaaaacaaacaaagccagtgagataataaaca

SEQ ID NO: 49507 - DNA, 829 bp, Arabidopsis thaliana
cccacgcattgcgatatgcccattttacatatgcagctgaatgtttgttggccattcaacagcttgctggcgtttttctgtcacaaggataaatgaccattaatcgcaatggagaagacaggacgacaaagtgcaaaatgaatatttttaaaaagtattgacctttaagtctttaagaccaccaacatcgtcccatgtcactttagggatttcaactgtgatgcctctgtttatacttggaccaaccacagattttgcaatcttgaagtcttgagatgttagaataagagaatctgaagatcttttacttgcagatattgtcgcttcacgacataaagcttccaaatctgctccaacataaccgttgcaagatattgcaatggcttgaagatcgacactaggatctaaattgactttctttgtgtacagctgaaaaaaatagaaaacatgaagatcacaaacaaacttactatatacgaaaatcccatttaagaactcgataattacctgcaggatttttaaacgatcctcctcatttggtgtgctcacttcaactaaagcatcaaatcgtcccgctcttcttagcgctgggtcaatcgcatccacccttttgacaagatcggggaaaaccattggatcattgcattcaaaaccaatgttgataatcaacttatattatgcttaaggtagacaagaacctatttgtggatgctacaacaacaactcttggtgcagatgatgaaggcttgtttgagtccataagtgtaaacagttgagaagcaatacgaacatcttgttctcgtctgcattttaaagagaacaagattat

SEQ ID NO: 49508 - DNA, 217 bp, Arabidopsis thaliana columbia
agtgtgctctaaaggatcatgcagctcgtatgagggattgacacgctcaagggcgtgccctggggagggcacttcgctgcaaagtgtctctcagcgacgggaacgtcgtcactcagggtctgaagccctaatctctgactcaaccggatacgctgcagcttgttgatcgactttggcactccctcgtacacgtacagcaagagggcgggccactttg

SEQ ID NO: 49509 - DNA, 533 bp, Arabidopsis thaliana columbia
  unsure (1)..(533): unsure at all n locations
actctagaccttttctgcggatcgagaggcgaaagcaaagggaaccacatctcttgtgaatcttaatggtgctgcatctgcgactactggctgataacatccaccaaaggctagcctattcatcgagaacctagctatttcaaccgcagagaaagatccttatcggtttcgaggtctaaagttgggaactcccatggtttaaatcaacaaatgaaaaagcaaagaggaaagcaagaggattcagacagcaaatgaatcagcaagatgattttggtgagaagcaattgagagagataggtacatgaatatatacactcatatgaaaaaagctagttggtcgacgtaaaatcacttggaaagggacagaagtagcatcaagatctctaattgacttttaaataaagagagagatccatctatataacacaagcccacttcactatacaagtgtcaggaacagaagccanaggctaaagagttctcaatatgacatatctcaagattgcaagtcttttatcacaaaccgtaaacct

SEQ ID NO: 49510 - DNA, 312 bp, Arabidopsis thaliana columbia
ttaaatgattttactacttattgaaatgtaatagttataagattttcaaaaattagttaagctaagtatatgtaaatatataatttacatatatagtcttacagtttatctattttaagttattagtcattttaaaaatattttgttaatttaaattagatataattatgtttatctcaacgatatatagaaaagataatataaaatatctgaagttttggaacttgagatttgaaatgtgtgtgatgttggttaaaggtaatgggtttttagaataaagaatgtgatggaggaaagatagttgagagtgaa

SEQ ID NO: 49511 - DNA, 223 bp, Arabidopsis thaliana columbia
gtgttcgaggtttgtgatatgtatgaatgaataggtgagcctggagggaggatattatgatgctggagaccatgtgaaattcggtttaccaatggctttcgcagtgacgatgctatcgtgggcagcggttgataaccggagatagctatccagttcgaaccatatggaacagacattatggtcaatcagatggggtactgactgcttcatcaaggcgtcatcc

SEQ ID NO: 49512 - DNA, 423 bp, Arabidopsis thaliana columbia
ccaacggtctgagagcgattgaacacgcttctgtgatgtgaagggcttaatcttttctatgctgacttcatcatcatatcttctttttttgtagtaccaaaaaggctaaaacgaaaacgatttagagaaatgacaacaataataaaaagtggggataatttttgatttctgatagaaagaaagagaaacaaagaaaggcgggaccgatccgccattaatgctaccacccaactacaaggcttttctcacacactctcttctctcaatctcttggctcagaacaaagaagataaaaaaaaaaggtgagtaagaatttgtctttaattatttcttcatgtgttagttgttaggttacttaaatcggcaaaagagatttgatgaacttggtcatatgctttaaagtgtgcatacatttttggggtt

SEQ ID NO: 49513 - DNA, 279 bp, Arabidopsis thaliana columbia
tgatgttgatctagaaaccatgtgatacaacgatgaaaagcatagttcagaaagcaataaattaaggttagacattaaacaatactcggtctcaaacgatacaaagagtaggaaatttaacgagtatatcacttaaaaggcagcagcaccacctgcttcatcctcaccttcaaaagcctcatcattagcatcctcattcaaaggatgaagtgggtcactgtcatcatcatgatccccatcagcattttcgttctccatgttgttagcacggtctggaat

SEQ ID NO: 49514 - DNA, 754 bp, Arabidopsis thaliana
ttacctggagggttctcattgtctcatcaacacttcggccaataccgaggttgttgatggtggaatgctgaatgactccttccttgtctatgatgaaaagccctctcagtgcaatgccctgtacttatatattagcaaaatgctttgattcaaagtggctatacgttacttgaaagaacacaagtggattggactcaatgcaagtatgatgcaactatgtcagaagaaatcgtttacctgatcagggatgagcactccaaacgattttgaaatggatttagtgatatccgaaacaagaggataattcagatcaccgagccctcccgactttctgtctgtttggacccacgcaagatgcgagaactacatgaacatggaatcaaacgttccattatccaaaagaaaacgttccattcgattatcagactgccacttgccaaggttctgagtacatcaaatacttgaaaccatttttcaaaatgctgagaccagaatgttctttcttggttcaggtggagaaataaaaatttgacttaccacactgtcgacagagacccctaatacttcggtgtttagcttctcaaattcttcataacggtcactgaaggcagtaatctctagaataagcaaagaaaaattggaaatttcagtgactatgagggcgagagtttcagttttgaagctatttccttagcagaatactaaccagtggggcagacaaaagtgaagccaaagggtagaagaatagatacat

SEQ ID NO: 49515 - DNA, 156 bp, Arabidopsis thaliana columbia
aggtgcatgtccttggggcctgggcaggtcggatacgaagctgccgaagtagtggacgccgaagctgaaggtcaggttgtccatgatgaccgagcgcgggtcacactagccgctgttcagcgcggacatgggcatcagcggctggcaggtggagcc

SEQ ID NO: 49516 - DNA, 912 bp, Arabidopsis thaliana
ctgttatcatggccgaaagaaatacactgaattaggctttaggaatgcaaaataaggtaaattatagagtagtgtcaatgtactattttgttgcgataattttaagggacaataaatagtgtttatgggaaaagcaaacgtcgtaaatgaagttattgaatcaagaagagacaaagtgatcatgcatggcatgtgctgcttaacccattatttctgcaacttcacccattttctttcttcttttatcatctaatatcatgacaaatcataccaatctacaattctttatacaatggacacaatcattgaattaatgtatagagaaaaaagaaaacaaattaagcagaagaaaatagaagatctgaaaaagttcatatggtaagtgatgatccgagtgatgacacttagtgtatccatcttaataataacttctgttgtgtttacaaaatactcggcgctttctagatccatgatctggttatagtgaaaaaaaagagagagaacctgacggattccatgccaatggatgacaaggccttcggtggtgagtttgttggtgagattgacgacgatggtgtctccggcgaaggcttttatggtgggaccaggaaactcgccgttgacggtcataacggcgccctctttgcagtccggcgaccaatacttgtactccacctcccaatgatattctctcacggcggcagacgccgtgtgagtcaagacagccaccaccagcactatccaccacacacccatttggcttatgtatgtgaatgatgatgatgtgtgctcatcataagacatatatataggaggagagaggaagagatagtgggcaaaacccatagattgggttttttggtcaaaaaggctatttatttattttttctttaaattttagggttttagaat

SEQ ID NO: 49517 - DNA, 382 bp, Arabidopsis thaliana columbia
aatctgtatatatcacggatctcataaaatattcagttgccagcaagatgatcgtctgtatatgaaaagtagcccaaaaatcagcttaattaattaatttgataatactttcgttcagtgtacacaaattgagactcaccgggaggaccgcggcaataaggtggcttgagacattccttaggaacaggagcgcaaataggtggagcgtacgaatgagacggcgtatctgcaacacagttccaccttatctattatatattgatacaaatgctgctatatacagagccgtaattgatattacataaccggtaggtggatatacgatcatgtgacatgtcatgaacggtaacataccagtacaaaccactcgagcatgggagat

SEQ ID NO: 49518 - DNA, 757 bp, Arabidopsis thaliana
tttccaaaaaatttatacaaaaatggccattaataattaatagtaatagctagttggacttcttagttcaaagtaattcaacattttttctaaaataaatcttctaataatagaacacgttggattgactaattaagtcaaatatgaaatatggaaaaggaaaaaaatccaccaacgatacaccaaataatttccgatttttatatatataaataaacatactaagagcaaaagaaaaacaaactgaaaataaaaaaaataaataaataaaaaaaaaaatccggccagataaatcgaatttatgtaataaatccgaccagataaactgatattattgtctttcttccgctcctttgtctctctatctctttctcacaattagattctgtgcttcttctgcgatcaactaagatccgatccgcgagcgtttcagacttcgatcagatccgattaagagaagcaaatcgggtcgggtatgactcgtcgatgttctcactgcaatcacaatggccacaactctcggacttgtcccaatcgcggcgtgaagctctttggtgttcggctcccgaagttcgatccggaaaagtgcaagtatgggtaatcttagccattacacgggttctggatcgggtgggcatggaaccgggtccaacactccgggttctccgggtgatgtcctgaccatgtcgctggtgatggttacgcttctgaggatttggttgctggctcttcctctagccgcgagagaaagaaaggt

SEQ ID NO: 49519 - DNA, 203 bp, Arabidopsis thaliana columbia
  unsure (1)..(203): unsure at all n locations
tccattctttantatctcannttctcactttctacaaatctttctcgcacttncagctagtcgtgttctctctctttttcagcaatccaaaaaatcagcaccatctatcatctttatccatcaaattcatgctcttggacgtcaacctgcagtcggtctcgtcggaggtaatcaccaacgtcaacaaaccttcaaccaacttt

SEQ ID NO: 49520 - DNA, 582 bp, Arabidopsis thaliana
ggtaccagcaaatctctgtttcatttatagagatattgagacgatacagactgattattgattcactttatcataagctttcatggaccgtatactatagggatcttaaccaccactaaaacaaattctgggttcacgaatttcagatcacataggaatgagtacctgcaagctatgaaaccgccatgacaccctgctgccttactcaaagtgcccacacataaatctacatcagcttcacagttaaattcctcagccacgccaccaccgttttctccacagacaaatgttccatgagcctgaccgatcaatattatttttcttcagcaaaagtagtagttgacaccaacatactaaaattttacttgaacattttcgatcaacttacatcatcaataactagaaggaagccatacttcttccgaagctgagagagctcttccattggtgcaaagtcaccgtccatactaaataagctgtcaaaaccacgaatgagatcaaccataagaacttctttcatatgtcgacagtctgaaaccaccaaaggcgttaataagcatagagacatggtttagccattgt

SEQ ID NO: 49521 - DNA, 615 bp, Arabidopsis thaliana columbia
  unsure (1)..(615): unsure at all n locations
aaccttggtcaaccacctgcgtttggcttttggaaatctgttcagaagtggaaggaaggtttgactacaagaccaggcctgatccttccagatctcacctcaggagctgaaagtaaacctgtttcacttgtgaatgatgttgatgaggataaagggcctgcttattttacctatacctcctctctgaaatactcagagacctttaaactaactcagcctgtaattggttgttcctgcagtggttcatgttcaccaggaaatcataactgctcttgtatcagaaaaaatgatggtgatctcccttaccttaatggggttatactcgtttcccggaggcctgtgatatatgaatgtggcccaacgtgtccttgtcatgccagttgcaaaaacagagtgattcagacaggactgaaatcccgcctggaagtgtttaagacaagaaaccgcggttggggtttacgttcgtgggatccttacgtgctggttctgtcatatgtgaatatgctggtgaagcaaagacaatggcaaccttagaggaaccaagaagaggatcgtatgtctttgcacatcgcgtgttttcactcgntaagtggattatgagctgacttgtagatg

SEQ ID NO: 49522 - DNA, 596 bp, Arabidopsis thaliana
cgaaaaataatcagtctgtatcgtctcaatatctctataaatgaaacagagatttcaatgtactagtagactggtaacagcttaagtttgttgacggaaacagcaaaaaatggaagcaactgatacagtcgagaggtcgttcattcatattttcaacagcaatccctgtcccaatggctgcagctgcttatgcagcagttgtagtggcgaggaaggagatatggagaagaaaggcaatatgggagagggtaaaagagttcaaggaattatctggagttgacatctcaagccccattatctcacttgttgtagggaatcaagagaaagccctcaaagcgagccggttcacacacatctctctctgtcttctatttccttactcacacacacacatacacttgtaaaactgattggtttttctcattgttgcaggtatctattaaaatcaggcttccatgtaatggcaatacgaccgcccacagtgccacccaattcttgcaggtaaacaaaaaaaaaactttaaaatgattttcttgtgaaatgaaacgatttcatcgtataaatttcagtaaactcatcatgtatgttgttgtgga

SEQ ID NO: 49523 - DNA, 478 bp, Arabidopsis thaliana columbia
tgttcattgcagatattagcagatagaagagcagcttctggcaatacttcatctgttccagcccgtgtccaaaatagaaaaggtacaccgaagctgctctcattcaccagtttacaacaatgaaacgagtcttacctcttatgtgctcatcatttttttttcctattctctagattctcgggaggtgcctgtgcctcagcaccagaacaataaaccagcctctgccactgccactgccacaaacacagaaaacggcttcttaaccaggtaagcaaagagcttttgctttcgctggagatagctttaagatttgacttgttgtagcttaatgggtaatggcattggtatttcacttgactgcctaattgattgtacgtgaatcaaacctttaagtttgatccttgtacaactcttggatctgcagtagtttagtcaactaatcagtcttatctccataaagcgtgcattgttgtatgtg

SEQ ID NO: 49524 - DNA, 770 bp, Arabidopsis thaliana
tcgtcaaaccgaaaaatttctcaaagttctcaaaagttgaagaggttagttcttcgttttcttcttgatagctacttgtctaattcaatataatgagatctttttccgactcataatacatggatataagtggatcaaaaaccctaaatctcttcaaatcgtcgatattgagaattagtgtttcagattccacttatcatcgagaaattaagagttcggtttttgtttgtatttcttctctaatgcgatcgtgaaatgttatcatgtgaaatccatagtttgtttattgctagtttaatgtttatggtcattttgttagagctaatggtatatgctttgctggtaatgtgtagatgactgaagagctgcaaaacaagaatgaacctgaacctctagttgagcctcagcattcaatggaggttgaaagtgggacgaaacgtccgagacctgcctttggtcctaataagcctaagaaaccccgatagaagtatgctaagagagctgctgtttgggaacattttctgcagagagatggagatcttgcaaagagctattgtaagtattgtactgcagaactcgcctgttattcaaaaacaggaggtactagtcctatgattggttacattgcaagatgcaaactatacaaggattggttaggaaaagaaaaacagaaggttataactggtgataacaataggaatatgaagatggtcaagtatgatccgcttatgtttaggagatcagtgaatgagatggtagtagtgaatgag

SEQ ID NO: 49525 - DNA, 128 bp, Arabidopsis thaliana columbia
  unsure (1)..(128): unsure at all n locations
nnnnnnnnnnnnnnnnnnnnnnctaaagggtgtttcagcaaggttttggggcagttaacggacgagtggttcgtgaactagcaacccactatcaagtcaggcaacaaggccgaagttgaaggtcaccc

SEQ ID NO: 49526 - DNA, 412 bp, Arabidopsis thaliana columbia
cttctaacagatgatcacgtaaagttactacttatctatagactcatgtgtacctcatgagtaccattagcctccgggtattgccggccttgacctccatatatatcatcggtgttgtttccataacttgcagccaatccaggaccttacgatcacaaatcattcaaactaataaggtggttttgcagtaaaacggtgtaaagcaaaaagctaaaaaggacggagaatttacttggggttgaagctgcttcagaagctgaattggctccccaagctttagtctccagatcaaccaattcttcctcaagttttacaatctctcgattcaaatgatcgatagtcttctccatacggcgctcatggtgaaggttactagctcgtgtcttcttctccagctcaagagcagccctgt

SEQ ID NO: 49527 - DNA, 549 bp, Arabidopsis thaliana columbia
tagcaagacccaaacctaatgagatttgaacttagtttgaaactgatctttataagtccggtcctggctaagatctagaatactttgcatttgcgtttagtttaaagcgcaaatggtaaaagaaaatttatttgtctttaacgtttacttttacaaattacaaagaaactttacttaaaccaatcgagaactaaatcaaactagaaaagtgtaccacatccattattgaaaagtatatcaacaatatggagtaaaaatgttagttttctcggaggtgaaaaacgatattaatttcccaaagaaaaatatttagcaagactttggtatattacagcttatattttatattgtagttaagagtccatcatttaaacggcttgagcttccaagaaagcattaaaattcttggtggcttctaataaccgtggagagatcgccggagacgtcgggtatgaaaccggcgatgatgtggagaatcgaacctgacgcagtgaaggagactccattgcttttctgtttttcgaaccagaaacctttaaaacacctttg

SEQ ID NO: 49528 - DNA, 1091 bp, Arabidopsis thaliana
atccccgaatattttggacacttaggttattacaaatacaaatattatcaatatatttatatttcaggtatgttcagatacttgttcggttttcagaatttgaaacttagaatccattataatattttaaaacttgggtacgtgttcggatcggttttcaagatcaaatattatgccaggcctacaattgagtaacatcaaaacaagcttatatttcttctcaaagaataaagagcaaataaaaaaaatctatctatatctacaagaacgtacaacattgcttgtaaagccaactatctgttttttctttctcgcgacagcaacttgtagacaaaactatctacaaagtgaatatacaacagtttaaagctctctgtaaatcccaaaatttcttcaactgggtacaaaattcagcggaaaagatcttggaatgaccacattataaatctagcaaatatatcggactccaaaaactcgatgtgagcagcacgtccgatgaatgagttcaggttacgaccataaacggtcatgtcaaagttgacgtcgcagcgcatgaacaccctttgctgatgaggtgcttcggggaccggtccacgtatttggtccagacaattattcagcatttccaagaaggcaactccccttttcgagctgtcgaaagaagcaggttggcatgactcgattcttgctgagtgatatggaacataaccgtcctgcattacatcacagtcacattattgttgaaaataagtatcagttttcccttattcattaacaaggcttatggctaaaactgcttcacacaatcaagttttaaaacatggaagcatacctgaggcgatgagaggagaattatatttttgaaattctccaatgtcttttgctgaaaaagaattcaaaccgattttagaaccgaataacagacgaatagttctgcgtatccgtggtgaaactgaatataagttgaggtatttttctctaaccttgcagagtttgtaaaagaaagtatgccggagatcaggatcatctgtgagtgtaagctgatggataacttgtgtactctttaacttcttcagtagccaaagcccgga

SEQ ID NO: 49529 - DNA, 434 bp, Arabidopsis thaliana columbia
tcttactatcagcaaattcgtacacagtattggctgttcgctttcgagatagaggaaacttgtggaagaataaaatagttggtagctagagagacatagacataactagttacaagatttacatctaccacgtatgttgttaaactacatgttgtttgtttaatccttaatactttggtcaaactataatcttcactggtttagtctaaatctaactcaaacatatggtgatgaaggcaaagagtatcaaattgatttaaggtaaatgagatcttacaatacttgagaaggatcagctccaaattttctaaattgtgacgaaattgaagaatacaacacaacaatgcatctttagatctaacacttacagatcttcatcgaatctatactcaaaacataactaaaaaccctgagaatccaggtttcgtttgttc

SEQ ID NO: 49530 - DNA, 408 bp, Arabidopsis thaliana columbia
ctatttgaaatttgaaatcataagaaaggattaaagaagctttatgaataatttaatgtaagacagtaagagacaacaaaatggattggacatagaatgatggtgcgcatatttccggttctagtaccagctctggagagattacatgagggcctagatatatcccttatggattctaaggggctgaaacagaagaaccgaaaggaaccgaagaaacgcccagtccaatctataatgatggaagccattcaaaaatgtgggttaacctttcttgtatgtgccacatcgtggacaagttacttgagcttaatctcaggagatggaatatgaggtccacttccatttacgtcttggcttcaagatggaaaaaggtcgtctccgataacactctaattgaaggccagagga

SEQ ID NO: 49531 - DNA, 490 bp, Arabidopsis thaliana columbia
gtgaagcatcattttttttttttgataagaggcaaaagagtatttatgttagctaatgtttattttacaaactatcaaagcttataccagcaatacttgttggctggagacaaatgtggaacgtcaaggacaaggcgagtaagcaataatggatgaaaatgatgatgaacgtggaggacaaagatcaagaccctgtgtgggattttcggagagatgccatgcacacactctgattcttcatttgctgaataggcaggtggtgaaggtaatggagtttggagtggagtctcccatgtttatcctcctcggaacacacttggtatgctcaacaacctcttctagatgttatgagacttgcttctggagacagttgagatattaagacaatgggcttgcaaacttgtgataacaaactggccttcgtatgttggttgaggaatatgccaatacgcgtgacagaaaggaagtatcaaaataatgaccagcagtt

SEQ ID NO: 49532 - DNA, 610 bp, Arabidopsis thaliana columbia
caccatcataacagtgcaccaactttcaacagctaattgaacaaaattaggttaagataataaacaactcttccgacaacacagttttatctttctgaccaaaaaggtaggaaatttccaattagaaccaactcgagctcaatcaatcaatcaaatcagacaaaaaaaaacgtttgcgtatatgttccaagagatcaaatcatcgaaacgaataaaaagctcaattttttaattaaaccccaaagtacaacaaatcctcctttaagcttgatcacaccagctacatcatcattatatgcaacatgcaacataagtacgcaaatcgattacagaaaactaaaagcgagcaaattgagacagaacaaattacagaatccaggaattggaccgccgatttgcgagtgtcggacgtggagctgaaatcgacgacggcgagaatcgctcgagccacattacttgccgtggagttgctatcttccattacttgcgacgaataattccaaaagtagagattccacactttcttctgcaactcgtcttgcagaatctctgatttggctttgggttttggggtttagagcaaacgcatcggtagtttcttaatagaaac

SEQ ID NO: 49533 - DNA, 1222 bp, Arabidopsis thaliana
  unsure (1)..(1222): unsure at all n locations
tgcaaatgtgcaaacaccgttagaggatctgttaatgttatgatggacatttaattccatacggttgttcatttagccacctcttctaagttatgatggacaaagtttatcctgtatagtacttacatctgaaagatatttggagcgattctcgatttcaccaatcatgtttctgttgaatgcaggcgacaaaactccattctgattgatcttgttccccatatgagactctctcttcgtcagggcacgataaaactctacgacttctggagcacgccgcacagatctttttccaagtgttctctttgatggaagtggtggaggtggtggcggctttgttgctgtagactgaccttggatcgttggcttgggatttggatttctgacctcttgaccctttgtgttggatttgacactctctggcgctttcaggttagatccgtctgtgttgctgccatcatatgagctctgcaacttcttccatagcattgatttcctctcattttcatgtgatttaagattgcttacttgtgctcttagacgggcaacttcttgacgcagctcatgattttccttctccagcttatcgttcctcactagataggcttgaagctccttcaccagacgcaggagatctgaatcatcttctccattaggtaacatgtctgtatatccccccttgttctattagatgtgggattgagtttgtttttctttggggggcaatttttcacctttttaatcacatgcctttaaattacttcccaaagaagcatcatagactcacctaaacctttgatgttcacttttgcgtgtggttaattgcaaattacaagtgtagccacagaacaagactaccctcttcgtagttagactgaactagaattgaacctggaatactgcgagtttacggtctaagctcttttgcgcttgtcttattcttttttttatgtagattaagtttgaagatcctctgagtccgcaaataagtcacaggtaagcaaatacataacttagccttcctaatcacatgagaagcaaagatatataagctaatttattatgttgaagcttcagtagctttagtcctcaaggaaatgagccattaggtacgcgttggacttgtgtctcaagtaattttcatttgctcatgaagtttcgtgtctcagtctctcacccactatttagtccacctccntaagtacacgtatgattgttttta

SEQ ID NO: 49534 - DNA, 523 bp, Arabidopsis thaliana
tcccacatatatactttataatttataacatatttaattatcaaatgcaattataggagcaatcttatacttacttttaaaattataaatagttttataatgtaaataaataatatgcatatatgtgttatggtcatttcttagatattagtgacaaacctatcatgggaacacaggttatagtcaatgcttgggcaatccaacgagatactacaacatgggggatagatgcagaagagtttaggccagaaaggcatttagacacaaacttggattttcagggacaagatttcaaatttattccattcggatcgggaaaaaggatatgtcctgggataggattcacatcggcattgatcggggtgacattggccaatatcgtgaaacggttcaactggagaatggatgtggaccacaaagggttcaacatgacctaactgaagcaaccggtctcgtggttttccgcaaattcctcttatcgctattccatcttctgcttgattcctcgtgtcaacaacacttg

SEQ ID NO: 49535 - DNA, 550 bp, Arabidopsis thaliana columbia
  unsure (1)..(550): unsure at all n locations
caaacgcttaacatgaaacaaaaaaaatgatttagatgaaatccaatggggacttctaatgaaaagatatgataaaatgattcaacaaacaagtaaaatacaatgatcagaatgccgaaaccaagaccaattagctgcgcagcaacttcccacacttcttcctgaaacgttgaacataaattaaagactccactaatagagtaaacaagctactacatgctcgtatttgggttttgattccacatacatgactagcataccttggctgctacctctccaagatttcctgagatagcgaaatgattctgaatcaccctgaatgaagggtctctcaatcctctagccacagcctatttcaaattgaaatctaagtatctcactctgtcatttaaagcttagcggaacaganttctggataaagatttcagctggcaggaaaataataaaactgaaatgaggaataccttggcaagatttcccgtggatgccaacagtaggaactgggatggatatagctgggttccaaatcaaagaagctacgaaaaaaaga

SEQ ID NO: 49536 - DNA, 547 bp, Arabidopsis thaliana
cacttccccatattgaccgacacgtggaatcaactacgggacacgaaatgttatcttttatggacgcattctccgcatacaatcagatcctgatgaacccggatgaccaggagaaaacttcctttataacggaacgaggaacatactgttcaaagatctcctcggcaaaacaatggaggtttatatcgacgacatgttggtgaaatcggctttctccacttcgcatctcgatcatcttcagcagtgtttcgatattttgaacaagttcgttatgaaattgaatccctcgaagtgcactttcgccgttccctcaggcgagttcctcggctatattgtgactgaacgaggtatcgaagcgaatccaaggcagataaacgcttttctagcaatgtcttcacctcggacaataagtgaagtccggcgtttgaccggtcgagtagctgccttgaacaggttcatctcactatctaccgacaagtgcttgcctttctaaactttacttcggaaggcgaatagaggttgcgaagacgcttttaagcagttaaag

SEQ ID NO: 49537 - DNA, 440 bp, Arabidopsis thaliana columbia
gagctcaacattctcggagaagactttagatattaactccaactcctcagacagattctcatcaccgttctcctcagttccatcagctgcaccagtaccatccttgacaaaaatgtctttcaaagcttctgatgcattctgttgcatttgtaacaccgcagcctttgcgtgttcttcaaccgacatgacctgttgtttctcctgaggaatcttcgagtctgaaggcggctcagatgcaccttccacaaccgtctatcaagagcaataacataaaaaaaagttaagtatttctgaatgaccagaattattcaagaaacctcccaagaatcacaatgatccagcaaattcatctttaatcagatcagaaccttccctcagaacaacataaatagactgataagcttgtcatttgatcattataaccagatagtaacctgaac

SEQ ID NO: 49538 - DNA, 339 bp, Arabidopsis thaliana columbia
agcgtcttcagacattttcgcatatctcttcatgtgatactgcaaataaaacgtaatcttctttagaccatagaagtaaggaagccatctgagttcagtaaattaattaccttgaatggctcattatctgtcctgaagacaatcccttggacattatgcaaccagaaaggcaaacccctgcaatgtgttattgaaaaccctaaaattccacgaacattgtgttttaccatatcggaaaatctcaacgatctaaagacggaaagagtttacccataagaccattccccttggataaaaggtccaatccgaagacagccatataagccatgatttttaact

SEQ ID NO: 49539 - DNA, 417 bp, Arabidopsis thaliana columbia
aaatgatattgagattttgtactggcatttttctgatggaaacgggatcatccagcccgatgatggggaggtttactacttccaggaagcttttggccataagcttgtcggtactagccgtgctctcaccactctacatcgacagattatcagaggaagatctagaagaggaagaagaactcttcagctttatgttttccttctctctgcttctcctcttgttgattttagccatagccttgtccttgtacagtgacccgagcttgaccaggtttgatccttactggattcacaggctatgtggttcgtttggtggattgcttgtcatcctcatccttcttgttttcgtcttgatatgcaagcctctggttagaatctgagcgaaagttgttttgatgccacaaatgaagaagaaaa

SEQ ID NO: 49540 - DNA, 428 bp, Arabidopsis thaliana columbia
tgaaaacgagtgcgaggaatgccatgaagaatgaaaccagtttcccctcttgcatagccttcttcgagcctctttgatagcaacgcaaacacaacactctttggaaccagctttcgttcatttacagcacttgcaatctataccaccagaaattttgattagttcaacaaccataaaccggaacaaatgttatgttctctctttacaagttcctttcattacctattaggctaagttatgtggattagtcaacaacattaaatgaatcattaaagcacacttggaatcaaactctataaacagcaagaattcccattaggtgatcataatctagacaactaactctaatcaaacatcttatgaatcaaaataatcaacactaacaactaagaacattaaaaggtaatgtatttaacattttcaaagat

SEQ ID NO: 49541 - DNA, 681 bp, Arabidopsis thaliana
aaaatcatttgatgtttggcattttccattgttgaggaattgatgtaaagaagagagcaagctcaggtgtagtcgtaaagaacagaggactgtaacttcaaacctgatcaaagatggcagtgggtattgcaagtgtagcaacggcatttggagaatcgactataccggatattcttccttcgcatggacagcatgagagtaagagatatacctgttctcaacatagtttcttgatcagttttatctcttgttttaatgcttgtgatcaactaggttctgtgagacacatcttgttgcggagatcagtacctgttcttttgagtaaccgaatttgaagagatagtctatagcgttgagaactgctcgtttgtatgcaactgttgcatctaggtaatgttgtcttccgctctcatcgacactgataccctcgaagacaagccactctgagaatcttggttccactggccctatctcaaagatcgggtttacgtggagagtggttggtcccattggtgtaaggtactcctgcatcccgtttctaatgatttcacacctattaatgagttacataatggtatctggtcagaatttcatagtaacactagacaaaaacagggacatctaagaaaaccgtatagagtctatttacagtgcaattaggaacttatgtacatacttgag

SEQ ID NO: 49542 - DNA, 605 bp, Arabidopsis thaliana columbia
  unsure (1)..(605): unsure at all n locations
gagtgggactcactctagagtttagctgtatggcttttcctgatgagattgctatagatgctttatctgtgaaacatcctggggactctttggaggatcaactggctaatgaagggcctgattttgagtaagcctttgtgaataataattgcaagtgtaaggttgtatagagataggcatgatgaacagagaggttataatgttggtttgtgtttcatcgctttttgcagagacttggacgagaatctgaagaagacgttctacaagtttttggagatcagaggagtgaaagctagcacgacgaatttcctgcacgagtacatgacgaggaaagtgaaccgagagtactttttatggttgaagaatgttaaggagttcatggaacagtgaaacgttaggttgatagctaagtacctaagaatgagattgtgaggttcttttcttgtgttcattgttagctttcaaatgtagcacaatctttgagaatttatggttaagagtttccagttctgattcaacttgtgatttcaaatgcanatcgaaatatatttatagataagcgaaatgaaaagtagtagtacccctgataagatcagaaatgtgta

SEQ ID NO: 49543 - DNA, 523 bp, Arabidopsis thaliana columbia
tgaataccaattgaattgataatttacagattcttagcatagcattcgttctaaacaatggatcatgatactcgcagcaataagcttcagaaattctttgtcgccatggaaacggccttttagggaacagatgaaattatcaattgcgccttggaggttagtttgattaccctttgtggccatcacatgaatatcctcttttgtgttcatcatcatcagcaactttttatggcaatatggtttgtgatatgtagtttctgatcattgtagggtttgaagaaataagtcaggaaagaactatgatcagggctttcccaccttctaccgaggatgtcgagacgcccagcagattgtcgacaagatacaactgcttagaatctgcttgatgtctacttgttgtttcatgatgatggttatttgttggtatgtgctggctaatagcctaacactttgtgttgttttcggttttgatggtgtggacacaaagcgtgggaagtttattcaagtgcaagatatatatagt

SEQ ID NO: 49544 - DNA, 270 bp, Arabidopsis thaliana columbia
aatttgagaatgcgtctagtactagaccattaggatcttcacaatgcttgaagtttcagtattagtgttttccaccgtactaaaaaagtctaatgggagacctttgttttaaattgtgatagaaaacagaaagtggccttttaacctgaaaatttccgaaaagccaaaaacttgtaccttctcaattttaggcatttctcaaaatcgcgaggctcgtcatagtccaagtgtagtcaaaagtttgtattccactttctggtgacttcgtcg

SEQ ID NO: 49545 - DNA, 298 bp, Arabidopsis thaliana
aattattcttcttacgtcgttttcattggtttagctattgacgttgacttgggttttgcttgagttcattctctattgtggtctaccatactttttcatgttacttgattgcatatttataaaacggtgctaaaagtattccgttttgtatagcattctagatgttgcttttgaaacaaagctcagctgctgttcttgtcgttggaaatacaactccagtccttcacacttctcgctccacctacagagttggaccttttccagtgaccagaacgcagtcgttccagagtttgactat

SEQ ID NO: 49546 - DNA, 448 bp, Arabidopsis thaliana columbia
ttctctaaaacggtttcagtaacaatggcaatgcgatgctgcatcaccgaagcacccatcggtccaactatgttcaatctcgttgcagcagaaagaacatctctgagcgttacaaacagatacgctctctgagaagtctcggaatccatgccgagtaaaccacatacaagcccgaatatcggtgcatggtggaaacatacattttttgaccccaaagaagcatcacgaatcatcttaagatttggtacctcagtaaaaaccgaagcagctatacgaaacatagctgatccttgtgacattgacgcctttgaagaaacgtggttagttacagtagcgttaagtatgtcatcacgtttatgccatgtctctatatcaggagatttgagagcagagtagacacaaggaagcaataagctagctgtgttatccaacacatgaatgatgtgag

SEQ ID NO: 49547 - DNA, 581 bp, Arabidopsis thaliana
cttgcaaagaggaaagaaaatgaacattagaaataccttaaccagtcttactattttcaaatcttcgtgtctagtaacagagaaacgagcagggaagcacacagctagtttctttattatattggtgtgatgcaatcttaactacaacagctatgcaacttctcatgtccatgaaactgacaatagccaagaaaataacaagaatcgagaaaatacttaagaagaatggttgacaccattatactcaatacagggggcataggtacctgataggagaagcctcgtgagagctacaaggcacagatgaagccgtattcagtttcccagacgaagaagtgcttgtgcaaatttgccatagtcaaactcttgaacgagtgcgttctggttccaactctgtaggtggagcgacaagtgtgaaggactggagtttttgtattcccaacgacaagaacagcagatgagctttgtttcagaagcaacatctagaatgctatacaaaaaggagcaccgttttataaatatgcaatcaagtaacatgaaaaagtatggtagcccaagtcaacgtcaataggtaaccaatg

SEQ ID NO: 49548 - DNA, 134 bp, Arabidopsis thaliana columbia
ctaaagacttgacatcccatgctcaagcgatccttccaccgcagccttccaagtagctggaactgcaggtgcacggcacaaacccagctaattgagttattttttgtagcgacggggtttcaccatgttgtcta

SEQ ID NO: 49549 - DNA, 472 bp, Arabidopsis thaliana columbia
gtacaaaatctgtaattcactttgcattggttcattgggtgatagatttagctgaatggtggttggtggctacattttagattgtatttctttcttggttaatctttttatgtccttacttgttagttggtttcagagattctataactatgctatgcctgtcatgaagcgtacctaaattttcttctgagtggtcaactttgtaggtcagatttaaaaggaagtaaaaatgagaagacagggaaactttgcggactcatcacctgccagtgcatatggagctggacagatacaggatccccattctgattttcaaggtcaattagaggcattcacgcctgagagggatcagccatattcagattcacaagctgagggtcaatggagatgggaaagagatggccctaatatgtcaaggccaatggctactgctgtttacaatgaaggttagtctttacttcatgcgttggtg

SEQ ID NO: 49550 - DNA, 851 bp, Arabidopsis thaliana columbia
gctatttaactatctatttttatttattagtttatacaaaaaaaaaattatactgcttttttagtaataatcttcttagttattgttttagtggatatcccgaaaagacattaactttgaactgattttacataaattatatatacaagaaacaattacatataatcaatattatattatcgttttacatcattgatctataactaatcatatgctagtagttgttgagaaaaataattattaatgctagttaaaaaatagttatataaagttaaaaaatgatgtatttaacaaaattgtgtgtgttttatttagtctttatatattcgtttaagaaaacactgggagaaaatgcaataacgttactaaattgagaaggaattgattcttggaatcaccaaacaacaccacaaacctcaacttgcaatttttataattttatcttatcaagtatcaacgtccttgaaagaagaccaacctcattggtaatactctaatagtctaatggatgtcttaagcataatttggttaactaatactaatcgtcgtagattggttaataaacttaaggtcaagcttccgttaaagattgaccatcaaatttcttgatttcaaatcctaacaccatttagaaagaaagaaagaaaaagtaaatgtgtttttctttttgtcaataagtagtactccttaaaatttaaatattggtaaatgatacactgatatgggagtaattaacctaaagattctgtaaaatctcgtagtaaccaaaaccaaagtcatgcgataatattgatttcccaagttaataaatattttgttactaaatttcgtttttagcagccaacgagaaa

SEQ ID NO: 49551 - DNA, 895 bp, Arabidopsis thaliana columbia
cctgacaagttccaaaaataatataaagatttaaagaccatgtcattacaagcaccgaaaagatttaaaaattcaaaaaacaagtcaatacaaattgttgtaatagaatgtcaacaaaaacttctaaatctcgagaacatgtcaatacaagttatcaggccaatacaagttatctaaaaatctaagatttttacaaagcaaaattgtgcatcctatttatccagctacgcctaaatcaaaccacacaaacaaatagttataattttgcaaagaacacgggcatgcaaaagataaaaactttgaagtatcgaatgagagaaatctataaattcagactttaagaaacaaaatagttgtcgagcttcacgacagctaaaaaaaaacaagctaggttaacgaaagggaagaaataaagctacatattcagagagacatgccttcaatttgggactcaaagagatggtttaatcggtgaattagggccgaaaagaggttatgtgtcgcagctaccttcaacgacggtggctaccttcaacgacgaaggcggcgagtttaatcactggctcccggaatcgattcgtcggtttgagagagctttaggagtgatggttaagttttagggttttctcgagaaaatatggcaaaaataattttgatgcaaaaagagaaatttttgtctaagtgtttggcggtatgagtattttagttttcaaggttagaaaaattctatcatagcgttaataaaaattctatattaataaaattatttactaacatttgtaaaatactatcatacaaaattaaaaattacaattaatcttcaataatagttgagtagttgtgctactacgttatgctatcaatgtagacattttttgtagtgagatataagtag

SEQ ID NO: 49552 - DNA, 519 bp, Arabidopsis thaliana columbia
taaacacttccacatacattccacctcctgccacaagcaactgccacacacaccaaaaagaaatcccagcaacataatgaatctttcagagtctgcaccaactaaaaacttccactactccgaacataaatttcagaattcctcattagattaaacatgtgatatagcgtaaaagaacccacgcgtaaaccacaaatgataactgtgtattagctcgtttcgagcatcaaaggacatttcaagaattgagttaaaatgttatggtaaaacatgactaaaaaactaagaagtgcactaagggctcctatcttgtttcaaatggttgagacttaaagaattcacagcccacagaaggatgagatttgctcttagaaagttaaactctttacttcaattttaacaaggagtcgtcacaaacattcaattgatagctgcaagttacacaactctacattgaaaccattttctcttgctttgtcattaacgtgtaagaacagacacaagatacaacttttagtg

SEQ ID NO: 49553 - DNA, 515 bp, Arabidopsis thaliana columbia
aatcgattgcttaatcatttctgccgttggattgaatcgaaaaagggcgaattatttaaaaagcttcagaatttgaaatcgaaatctgtgagtactgttgtgtttgtggaagagagagttttggggtttaataatggcgaaactgcgagggatcacgaacgcagtaaacgtaggaatcgctgttcaagcagattgggagaatcgagaatttatctcacatatctctcttaatgttcgtcgtctcttcgaattccttgttcaatttggtaaacctcactctctcacttatttctctgtgttgggtattgaattcaattgactaattatggagttttctcgatttcgtagttgctaaatttagagactttgttatagagattatgtcgaaagtaaggtttttgatgatcgggagatttgattgtggtggatggttagtgacaaatttcaccttggaaattgttgagatgatcagatgtcattagcatttgtatggtcttagaccatgtgccaagaga

SEQ ID NO: 49554 - DNA, 393 bp, Arabidopsis thaliana columbia
tgtcatggatttacaattatgatgatgatgatgatgataataatctggtcaataaagttgcatcatgctagtagattagaaaattcgcctacaccacaaatattggaatcgtaacttctttatccatttcttattatataaagctaactgaatcagtacaacaaaacccatttagaatagaaaaaatccaacgaaaacaggataaatactttaaagggttacataaatctattcattttgagagatatgagttacataaatcatataacttatttataatcactctttgcatctcgtgacagtattagttttcttactttatttatttatatagtctctttgatagaaggaagattccctattgcctaacctaaatatttccatctatgaatc

SEQ ID NO: 49555 - DNA, 502 bp, Arabidopsis thaliana columbia
tgtttttgctctgtttttataatggcttgtttcttgaattgtgttagatttgatgtctccaagacgatcaccgacaaacccacaagtcaaggatctggtgtgacttgttataacagctgggatgatgttgaaactctcacttccaatttctctagattgattggttctggtggctatagcagtatctacatggctcgcttctctggctctgataaagcggctctcaaggttcatgttagtagtcaccgtctttatcaagtctttagacttgagcttgatattttgcttcgtcttcaacatcctaacattgtcaagcttcttggctatttcgatgattcaggtactagttctgaaatctcatagattctgcaaatatttggtgtctggtcaattgtgttgttgtcttgattaagccaattttagtgattaagtttgtcttaatcaaagttttgatctttatttgttgtatcaagttgtttgatatatttgcatatagacttat

SEQ ID NO: 49556 - DNA, 508 bp, Arabidopsis thaliana columbia
ttttttacaaagttagtgaattagtgtatttatcatatacacaattattattaagtttgataactggagtagatctaggaccaaaaccaagttttgtgtagtaggactatacaaatttgtgtgtttatttggactaaatatttttttttataaaactgtaagacaattttctataaaaaaaatgaattccttttttttcttttcatttattgattaattaatatattgttccggcaaatcaggtggattggacgccggagttacaccggaaatttgtacaagcggtggagcaattaggggtagacaaggcggtgcgtctcgaatcttggaaattatgaacgttaaatctctcactcgtcacaacgttgctagccatcttcaggtaaattttagactaaaactatacaaactaattttaacaggaattaatcaagtgctataaccctaacatagtaattactaatttatagattacatgttttccttcaaaattttttatgaaaagaca

SEQ ID NO: 49557 - DNA, 540 bp, Arabidopsis thaliana columbia
caagtgttttcaaggtgtggaatcgcatggagttgggagggaagatcgatttcaaactctcccaattcatcagtaacagccttaatccatttggacctccttttggatccagtgtggcacttgatggcaacggtggcacctgcgaggatcatgttagtatatattcggacggaagacaagaaacatgaagaaaaaaggtagagaaacaaatacctgggatagggatggagtgaaggtgaggacgtgaagtgtcgcagagaagagatccggtgatcacgacagaggagagtttctgttcaccgtagccagccatctccaccatttccgttctggtccataaattattcccaaatgctccggtgaacaagaagaaagagagtaacaagaagcaacggatgatgaagaagcttcccatcgttaaaaacaaagaaaagaggtttgtttgtttttctttgtattttgttaaagaaatgaaaatagcatgaatatatagagaagaagaaggaagctaaagaagaggaagagaccctttgcgtggtg

SEQ ID NO: 49558 - DNA, 531 bp, Arabidopsis thaliana columbia
ctaattccacctccgccaccgccttgcccaagggtcttgatgaggatcagagctctattcctcatcctacagggaagcaaatgcccaatcagatgcacaatgtggtcgtcaacaccatggcggttagggcaaaccctccgaggaagtcgactagcaacggtgtgagccagagtaatggtgtgaagcaacctagcagtgtacagcagcaccagaattcgacttcgagcgcatccaagactcgagagctggaagactcagccaccaagtgtcagattaaggcgatggccgcgagacgcctgtggaagctggcgaaaggcaattccaccatctgcaaaagcatcacagagtccagagctcttctctgcttcgctgttctgattgagaagggcgacgaggaaggtcagatacaactcagctatggcgttgatggagatcacgccgttgcagacaggacgctgacctgagacgtccgcgttcaacccaattcccggcctgcaaggtgtggttgataagtgcttagaacattgagat

SEQ ID NO: 49559 - DNA, 438 bp, Arabidopsis thaliana columbia
agtagatgttgttcaaaaaaaaaaaaaaaaaaaaactgtttagtagatttataatattttgttttatttcatatttttaaacatttccatagtatgtagcaaaactatatttttttattcagaaaatattaatattcactgctctttttttttcttcaaaggaggaaaaagcctttatcatttggacggacaagcgctcgagaaactaatttaattcaaaaatactttttttttgtttttctgtcatttcgaatctgtctctaatctcatagggttcaaaatttggtttctgctgttctctcgagaaaaaagtacagttcccgcattgttcagattctctaagattcattcatcaatctgacttttcccgggaaaattcactgtctctgagtccaaacccgaatccagcgatgatgtcgaacttggtagagccatcgt

SEQ ID NO: 49560 - DNA, 811 bp, Arabidopsis thaliana
gatgctccagcacaagtgtctgccctccatcctaaaagcgttgttcaaaagaaaagcgtgggacaagtttcaactactagtcaagaagtttgcaggatttttggtattttatacaagttggactattttgacttctttgctgagtttttctcttttatttctggtattgtgtagtaatatcatctgttctctcttattgattcaacaatatccttgtttcaactttcaagtttgcttatatgttctgctcttttctcctgatcagctttctagatttctttactgggctgaaacaaagttaaatggtcttttttacaaaacacttggtttaacgtaataagaaagtctagtttcttgctatagctttatgtctaggctctccaatactggttgtggacaagtaggtgaacaacaaggacgataaagagttccatatttggagaaacagaggagatctctaggtaacatgtgtcactatggacaaaagggtctatttgattctgattctgatccatctctatagctagggataataaaatgccttagtctcccttcctgtttcttcatgtacccttcacacaagaaagccttagaaaacttgtcttctatttccctgttaacatcatgcacaaacacatcagtctctcctccctgtttcctgttccttgccatcattcccgcagtgtaaattgctgtcattctcccaggagcctcatcgtagtagccagtcggtgcatcaaccatgattagatcccaacggtctcataaatttctgcaggcaaaccttgagtgctagttgacacattgagta

SEQ ID NO: 49561 - DNA, 464 bp, Arabidopsis thaliana columbia
ccttcaactgcatcttctaatgcaaatgaacaagttcgttcacggaactcaggtcaactttctttgtctgatatattcttgaactcaaatgagcttttcttattactaccaaaaacttacctaattgtgtgcctcaggatcggttcctcgaacctctgggccatctgctacgactggtgcaaccccaagttcaatgcgctgggatgagcagacgattcagttttcagtcaatgcttgggtaagataaagtttttcagttgcagtttcttcctcttattgcacaagtttaataaaaagatctagctcttgttagccctgtgagttgggattgttgttgcaatctgctgttcactccttaacttcacggacagtaatgagatggtgcatagtgtattgtctgtctttatgttctcctgtcttgctgaatctttgttgtgtacttagacatgaactagatgtgacaa

SEQ ID NO: 49562 - DNA, 580 bp, Arabidopsis thaliana columbia
cctatttggatgcaggaaacaatcttccggataaagcaaagaccgtcaaagacctgaaacgtctctgcatggtctttgaaaacgtggagaagttggtagcggttgcggcatctattcacagaaagttcctggacgcatcacgccttgctcaagtaatattcagcgacttctatggcgtttatgctccaacaaatgggaatgagcgcaaatgatgaagagaacaaaagcaggacggtgagtcatcgttaaaccaacaagaatttctctgatgggaataaataaaagtatgatgtaacgcctgttcacttgaaacacaggagatggaagtaagtagacaggaagtgagtttaagagaaagacaagtggtgtcgaatctgttctcgcctccatcggctaaccagtcttggagaaaagtgctcagtatgggaaatcttctaaacggacacgaacctattctcagggagatcattttctccaccggagacgatgtcaacaacggaatccattacgcggcacgtgctgatgtggcggccacaagtgaccggaagggagaagaaatcgagacacaccgaatgtatgt

SEQ ID NO: 49563 - DNA, 476 bp, Arabidopsis thaliana columbia
  unsure (1)..(476): unsure at all n locations
nnnnnnnnnnnnnnnnnnnnctaaagggtacaatggtgatttagagcctcttgcagccgctttccccgagatgatcataaccgaatactataccgataggcggatttacgcgttctctgtcatcggttttgtaaaggaagagacagatgcagcatcatacattttgctccacattccaaaccaagctgtaaagtacaacttcatagactagactttcaagaaactttgtgatttcaagtcattggtcaatgatgctcctgaggatcacttttacagattccacagaactttccagttcatcaagtctcttgctaatgtctcaatagtagtgtatctgtctctgtaaaatccatccctatgtagaagcttttattcaaaagatgatacctcttctaaaatttcccaatctcttcaagcttcctcaagacctgtttgacggttggcctaagagaaggcgaaggagcgctacaagacat

SEQ ID NO: 49564 - DNA, 528 bp, Arabidopsis thaliana
  unsure (1)..(528): unsure at all n locations
ccacttcctgaacaaagaaatcttctagctagccatgagatccatgatcgcagttcaccatcaacggcattgaaggtgggaaatccctcaagacacattgcgattgcttcgatccttaatcacgagcgcaccattgatagaatttagaactataaaccctatcctttaactctctgtacttctctattgatcaacaatggtgaatacaagaactctaattcctaactataccatgacagacacgcagctctaactctaacgaactcgcaggtttgttgttacacgtaaaaattgatcacgcaggatttcctctttctttcccacatgtgctcttatcattaggttcgtgaaacctgtagcaatagagctacaaatgtacgtatcttttacaataacactaggattaaacccgcggtttaccgcanngtattttttatttaaacagttgtcaaaatagtatttgaattatataatttagtttaacccgtgttgcgtccaatttagtattgtaattataattttagatgt

SEQ ID NO: 49565 - DNA, 448 bp, Arabidopsis thaliana columbia
gatccgataatgatcgctaatagagatgcgattgttggaggttgaagtatgtgtttgactggagtctgttcagccacaactcttattctcctcattactctaggctcagccaagcattgaatagacctagggctggaactctctcctccatattctcccccgagatcaacttcaggaaaagaagtctgagagaaactagatatgctgttgaagactctagcaataaaaggtgtcttgcaatgttctgtctctttgtcctcaatccctggccactcagcttccactagaagaggcctactagcatcatgattctccacatcgaactacgctatctgaagcacgttcgctacaatgatgtcttcagtgagttcagaccttggcagacacgcgagagtaatctttgaaatttcatcgtgatggggatagatcattgcaattgttggtcttc

SEQ ID NO: 49566 - DNA, 705 bp, Arabidopsis thaliana
gaattatttctatgtcgatatgcgtgatttcagaattaaagcggcgaaactgcgtggcgaaccgtctgaagggatgctgtgctccttctctgaactgggcatttctgacgatcacagcggcattatcgaactgcctgcggatgcgccgattggcaccgatatccgtgaatacctgaaacttgatgacaacaccatcgaaatcagcgtgacgccaaaccgtgccgactgcttaggcatcattggtgttgcgcgtgacgttgccgtgctgaaccagctgccgctggttcaaccggaaatcgttccggttggtgcgaccatcgacgacacgctgccgattacagtcgaagcgccggaagcctgcccgcgttatcttggccgtgtggtaaaaggcattaacgttaaagcgccaactccgctgtggatgaaagaaaaactgcgtcgttgcgggatccgttctatcgatgcagttgttgacgtcaccaactatgtgctgctcgaactgggccagccgatgcacgctttcgataaagatcgcattgaaggcggcattgtggtgcggatggcgaaagagggcgaaacgctggtgctgctcgacggtactgaagcgaactgaatgctgacactctggtcatcgccgaccacaacaaggcgctggcgatgggcggcatcttcggtggcgaacactctggcgtgaatgacgaaaca

SEQ ID NO: 49567 - DNA, 501 bp, Arabidopsis thaliana
tgcttctgcgataatgatctcttgacggatttgttctttctcaatttctcgtttgatcgcttcccgaacttgatcctcactttgttgtcctacgaaaaaggttcataatcacttcacatttcgacatgagaagattcataaacttcagatttttcacacagatttcaatttcgtgaaatcaaaacatgaaaaaacaaacactcaaaatttacgttacagaaactaaacaggtctcaacaaatcaactcctatagacaatcgcatcaccaaacaaaatacgaaaagtgcagaatcataacaatgttctctgtcggggatggataaaaaatacgatgcacagacagtacaaacctggcattgatcgttccgacaagaaaggaaagttcggtttcagcgacggagatggtgtcgtgtccgtcgcaggaggtgggcgattattatcgatggctctgtatctgaattccatcgaatgtcaaatttggagagagagcggagaaagag

SEQ ID NO: 49568 - DNA, 378 bp, Arabidopsis thaliana columbia
acatacccctctaaccttctaccttaattatattcatcagacttgtaatgattacaccacctgatatcacaaacagatgtagctagttaacacctatatccaataactcaaacaagagagagtcttgatcaaacatgcaccaacttaaacagaaacaatctacttgcattcacacaatctctcatacccatcacattagatctacaactacatacactagtcatactcttaagaaaattaagctcagtttgaagcaagtagtacctctttaaccagaggctggagcttcagggagaccaagaacctgtaaccttgtattgatcacatctaatggacaaacaaaagtcgccgcgatagcccttgaaaaaaaatcccaaa

SEQ ID NO: 49569 - DNA, 466 bp, Arabidopsis thaliana columbia
tgtaaataatatcttttaaaattagtttttgtgagtttttaaacaaaaactgattaaaaaaagattaatatatttagtgaatgttagatttaacaataattaattgatttattattttctcttttttttttttttttttgaaacatccgaaaactgtttttcttaacaaatttacaacacaaacctgaataaaaccacactccaaatagctcgagtcatatccatatgtaatacttacagattttgtatacgattcttaggttttcgttttcgaggttttacttagattataagtttcaccgtttagtttttggataggagtaataatataagataaacaacaaaataaatgcgaagtatataagtctacgtacatgcgaaaatggaatatgtcatgttcatatgccaggtgtcaagatcgagggtggcctggcaaacgactcggaacacatggctctaccattga

SEQ ID NO: 49570 - DNA, 645 bp, Arabidopsis thaliana
tgtttctagtcacattctgatatgaagtaagatactgcaacacgagagagatctcagtccaaaaaggtttactttttgtcacctgctacaaattcctgaacaacattgttcaaactgatacctgaagtttcttcatttcaatctgcgtaaatattgcaaagcaaaacacaactcccatatcctctggctctagctccacaagatgatccattgcaaccagagaaacatcaagattgccctttcttctgcaatagctcaacaatgaaccccatatctttgagtcgggtttcaccggcattgtctgttatttgaacagctcgttctagttttcccgctcttgctaaaacatcaatcaaacaacaaccgtagtgttcaaattgggtattatttgaaaatcttgtctcatcattaacaaaatacttcaaccctcatatgatcaaaacagtggatagctcgactgatcataccacatttcgagtacttttcaataagatcattgcaaacaccaatttgttttagaatcttattctctctgcacacaacatacatatggatccatttgccaagctctagagatcgaagatgctcaacgaccggaaaacaaaataaacgagtgagactagaaatgagactgatactagttaa

SEQ ID NO: 49571 - DNA, 619 bp, Arabidopsis thaliana columbia
ggaatcttttatcatcgttttctctgcgcattgattgagaagcatgttgatcgactaaaccctaaaactctctctgatccgaacaaattgggaaattgaaatcggaagattctctggaaataacgatggtatttaaattagattttaaatcacctagttaccttttgcccaggaaacgtgtgtgatattaacccaagtgccctcctaatttcattttcttttcgggacattttgaaaaataactcagatttctgttgaattttgcttctttttgtaaataatcaaaataacatgtaaaagatataatatgagataaaaattaaagtttaaaaaacattaccataactaataatttgagtaatttagaaaaaaaaaaattaccacaactattcttgatataatatgagtaaaaaacttcgaaacgagaagattgaaaatttaaattttatttttcgaattctagctaattggttctatttttttggggatatttaaaggtctatttgagacaattattcatatatttaaataatattaaacatggaaaattttgggacatacgtaacgacatacttgttacattaagttagacatattagaacaagattattatttgcag

SEQ ID NO: 49572 - DNA, 549 bp, Arabidopsis thaliana columbia
atcgattgctaaattcattcgtttttttcgtccttcttctttcttaatttcatccctaactatttgatttatcttccatagtattttatatcattgcatggattaaattgatggccataatgttgtgagttgtgagtgccaatatgggttggcaagcatgctgacttattggcgttttccgtgacgacccaccattatcaaatatccgcctatctaatacgtccaacattagggtttcacgggacaacacataacacaatcatatcatatctctccaataaaataatacaatccataattatcatcaatctccttttctttttctttctaaaatttacaatctgccagagccgctacataattagacagagccgctaaaaaacccctcaaatttgtatccatacatttccaattacacagtttatcgtttccttctttttctctgtatatttaaataacacacttgaacctccgaatccattagcacctacaaaacaatataatctcagaaaagagagaggatgagctcatcctatttacgagtaatat

SEQ ID NO: 49573 - DNA, 368 bp, Arabidopsis thaliana columbia
tgtactcggagtccaacacgctgtcagatttgttgcaaagcaagtaagtgtcaccggttcgcgaaggcgatccaaaagagatctctaatcataagatagcaaatctatctcatctagacgttcagatcggatacattccatgcgactcgccaaatgcctaaactgcactagcagatcctgccgtgctagagaaaaccatgcagcctcagatgcgagttcagactgccatttgatacacagtattagcaagcaatatgatcacagaacaccaataagcttcagcatcatcactcttggacggagattacatgaaagaaagcacatacgctgagaagggtagttgcagcctcagattcactaaattgttg

SEQ ID NO: 49574 - DNA, 359 bp, Arabidopsis thaliana columbia
caataatttagagtgtcagctcatgcatagcaacgtactattcaatgcgcatgcctctagacagatctacgacgcacgaaggtggatgatgccactccatcagcgaccttctggcgctactcaattcagccctagaggtactcatacgcacattatcgtggtttggagtataacgctggatccccattacttattcgggcaatgaacatcgaattgtaacatgcacgaaacatcgttcatactagacggggtaccctacctagcgggtgcggtccgcggatgaatggttcattgggtcagctgacgagggttcatatggtggctatcgcgaaccctcccggatgggatcactaccggca

SEQ ID NO: 49575 - DNA, 522 bp, Arabidopsis thaliana columbia
tgagtaacatggtcgttgcttgttatttgtttacttaattaaacctgataaatcttttttatgaaacacttaatatgtagtacccaaaattatatagttatgtgaggctttaatattgtatatttagcaataactaaactatatgaactttgattgccataatgtatgtttatataaaaaaaattacttaacattgacatccaaaaaaagtttataaattaagcctttaacaaaataaaaagtttataaattttgatatttctttgtcgaacgtgtgatacataccacgtagaacagcagcaatataaattataaaaatatagtgaaaacatattattgtaacactatataggctatagcacctagacttgttgacgcatttgagagagtttgaccaaccgactttacctgaaaaaactgccaaagctcttaacctaatggatctttggctgcaaattgctttcatttaaattataaaattctctgaaacctgcgttcttgcgatactttagttaacaatag

SEQ ID NO: 49576 - DNA, 598 bp, Arabidopsis thaliana columbia
gactacactcaccactcttgatgtcaatggctgcaccggcatcaaggtgaccttttctatatacgaaaattcaattttctagtttgtttcctctccaatattcaagtttctatgtagtgggagacactcgagaccaacactttcctcttaactattgttaaacacatggtaaatttgtgcagagacgaagccgtgaagagttgcttcagatgttccctcgtttgacatgcttcaaagtacacagctgaaatttgctcatataaattagaggactctcaacaaatgtctatccttcagttataaatttgctcatataaattaaagtctcaaaattttatttccatgtattttgtatgagtttccaagcctaatagaaaatttattttttgagcaataataaataggcaaaaaaaatgagaagcaaataggataagtccaatcataatttacctatacagtgctactactacgcgtgtcacgtattggatgccttagtacacagtaacaaaatacgccaatgcacagcagataaatatttggccccaaaaatatctttttttttgttgttactggttatgtgttgtagtatttatatata

SEQ ID NO: 49577 - DNA, 557 bp, Arabidopsis thaliana columbia
accttgtaatatggctgccatattataaccacttattgtcaattagcattaagtcggaagcttattattcctcgagtatcgattcgtagagggtatgtataattgacttacaggagccaaaagagtaagggatttgatagctcccggatgttttactgcgagtgcaagagccaaaatgcagcctagggaatgagctactatgtggaacgttttgagcttgaacttagagatcaccgatttctcaatcatctccaaatgttctcttaaagtatataatgagtcatttggcttaggacttcttccatagcccaaaagatcgactgcgatgaacctatagttcgatttggctgaatcagaaaagtttgggaagagagtctccgtccaaaacgcggatgatgatacaaaaccatgtataaacacaacgttgtctcgggccttcttgttatctgcacatattttacatatatttcatttattttatatgttacttaatatattcctaaaataagaaactgttgtgtatcgatacggatagcgcaagtaaatatagtaatgag

SEQ ID NO: 49578 - DNA, 325 bp, Arabidopsis thaliana columbia
gtaactaaaaattttaaaaatatttttattttcagtgcaatttgagataaggagagtctactcttagtattacagttgttggagcgtcaggggacttagctaagaagtagatatttcctgcattgtttgctctcttttatgagggttgtcttcctcaggagttttctgtcaatggttatgctcggactatactctctcatgaagagcttcgtgtgatgatgagtagtacttgaacatgccggattgatcagaggtatattctgctatacgtttttcgtgaaagcgtcagttatagtttatgctccggttatatgcataaaagttg

SEQ ID NO: 49579 - DNA, 440 bp, Arabidopsis thaliana columbia
cctaatcctttcttatttcttgtcataaacaggaaatttacatcgtcagaaattcagacaagaaaagttggcaaaccctaccacaagatcaataccctaaaccattgattttccacgatggtcgtttagccgttaagccaatacctttaaacacactcgtattattcatgtgggccccattcgccggcgtcttagccgctgcaagactcgtcatcggcctaaacttaccttactccctagccaatcccttcctcgccttttacggtattgaccttactctcagtgtcaacaagcacaacgacctaatatccgccgacagaaacagaggttgtctctttgtgtgttaccatagaacgttattggaccactttacatttcatacgctctaaggaacgagaacatgatagccgtgacgtatagtctaagcagattatctgagc

SEQ ID NO: 49580 - DNA, 562 bp, Arabidopsis thaliana columbia
ccggaaaaaatcaataaaatgacaacattggacaaatcacctcacaaattttcccacaagtcgtcgtatatcagcaaccttgtcatcatcatcacatgtcacaaagacaattttctcctgtaaaaatgtatgcgaaatgaagatttttcaacaatgcacttctctagtaaaactttagggagtaaaaaaaagtgggaataaggttagtgcctgccgcgctctaacgccaaggtgagacaagtgaggcagctcctgcagaagcatgactccagctatgttcccattagcagcacttacctgccaaagcaagttataaggtaatctttagtatgatgttatgaatcatggtgaggttgaatgtaggtcaaaacctcttcatcgccatcagctttattgaccaagagaataataggaccaccagaagttgctggcaatgatcccggaacaatgctctcaacctacagtcacaagagccagaaaaatgatctacaaatgcgaattctcatcaaagttacaaagcctgaggcataagtcgaaaattttcaccaagtaatggtgcagt

SEQ ID NO: 49581 - DNA, 525 bp, Arabidopsis thaliana columbia
gctttaggttttgcagtttatgtgctacttaactggtttaaagatgacagatgacagaatgataattatcagtacttaggatgtataaggaatgcatttgattctccttataattcatattgattgagctattttaacattcaatgataccacttgtgctgctattgtatcaagggccaagtttgttttaacatattagagttaagaatcatattatgagcttctgcaccggatactactaattccaatatactgtatatatcttcactttgtgaatgagaccaactgcacgttgaatccctatccatgatcttagttgatgaccatccaggcactttgatcacgccgtttgatttcattactttccttacatgcgcagttcttccaatttccctgtgcttgaatatatattggctagtgttacaaatgcagtttcagaagtaggatccagctctagaatcctctcagccgcccttcttccacgttcagtgtctcctttcgccttacacgcattgagaagtgtgg

SEQ ID NO: 49582 - DNA, 150 bp, Arabidopsis thaliana columbia
gctctcctctccgagaaaatggcgttcggtttgatcggaagagttgtcggaacccaatcatcacgattatccacggcggcgcgattgattccggcgcgatggacatcaccaggatcagaagctcaatcgaaagcttcaaccggcagcgga

SEQ ID NO: 49583 - DNA, 533 bp, Arabidopsis thaliana columbia
gtggctcccgtaacctccaaacactactaaacgggaaccgttgacacaagaaagtgtgtgaccccagcgacccggagaggagagctgaccagaacagatttccactcgggactactcgagccaaggtccaacacaaatgtatcattcatcggctgcatattcacaccttccccgccaaagataacaatcctgttcccaactgcacatgcgctgaaattacaccgagaaggctcaacagtacctccaactgaaaacttcctccatgctgttgcttcgtgagtggtgaactctcgggccagtcgcacccaaccaatcctttttgcaccgggaacactctcaagaacacgtgttgcctcggtaccccatgtgttttgacagaccattctccacacatcatcattctttgtcaactcattgagccgcctacatacacaaccaaccgatgcaatatcaccaggagtcaactgtgacaatatcttgatagctattacttcatcactcagttcgaatatccacagagtcacgagaaacat

SEQ ID NO: 49584 - DNA, 593 bp, Arabidopsis thaliana columbia
cgtacgtataggtatgatactagtaaaaatacaagtttaaacctgtctgattgttcacatttcttaagttaaattagtcaatcgaaaagtgaagttttaaagagttaatgttgtttacattcgatggtatataagtgagttttccatcatttttagtttcattatgaaaacattgtctacttcaattttttgtttccaagttaggagaattaaacagaaaatttttcattgctactatttaagttctatttattttgtttttttgaatgctatcaaacaatcgaatggaatgccaataaatttatttgaatatatcattcttatttttttttgctggaaaatataattagtttacattgaggaactaccgaactatcatgggcataattacttctcatcagtcaagctctcattatatcgctgtgttttattaatcctacaaagtaataattaattattttttttacttcatggacatctcatataaaacaagaaataattttctaggaataaaaaagaaaagacaaagagagatataattaaacaaaaaaaaaaagatatgatttgagaaacaagaagaaggaaaaagagga

SEQ ID NO: 49585 - DNA, 364 bp, Arabidopsis thaliana columbia
ctgcctggatagtctgctctttcctgcgccggtgggcccagaaatcacaatcaccttctccttttcagactttttcttcttgttcccgttcagaggaacagagcaggccgtggtggctgcgcagaatctccggcgcagtacaaggcttggcggttgaagtctcaagtaacaggtacgggtcaaaaatacgccactgccaatcaccattataaacggataacgaagctttgaaatttagaatttggaagatagcacaagtttgctacggatatactgaggttgatagaagggaaggaggacgacccgcgcgaaagctcatctcgaagagagacgaagacagtgagcaagggattagagaactacg

SEQ ID NO: 49586 - DNA, 479 bp, Arabidopsis thaliana columbia
taaatttataaaaattaatgttttgggtacgtgatgcagatgccagccacggaccgaaagtgatgtaactcatctctctattcgtttttgatataatatatgttgtaataatattacacttaatcccatctatagtatacatatatataactgaaatctaagtataaactatatataaaaaaaacaattaccaaaaataaataaataagagcaagtgtctccatcacacgaaatcatcaggctataagcatttttttcttatccaaatttatatcacaaagaacttagcttctttctaggaaattttgttcgtggggtacttcaatatataacaatataaatttagtgtggggtatatcatttatatatttatccataatatatttgtagaaagaaaaggctaaaataaaataatccaaaatctttcacaataaccattataaataacagcttatccaagcatatgttcaatacaacct

SEQ ID NO: 49587 - DNA, 557 bp, Arabidopsis thaliana columbia
cgttgtatctcgcgaattatcgtacgtatcacagtcttggccgcattgtcacgcctcccaggaaacagagtccttcccagtccgtacgtgatttccgacttgtaatcccagaagacgtctccttccaaattccaaatctcatgtgagttttattgtatctcttttgttgaactgtgtaatttcggtctgttgaatgtatcgagttgaatcagagattcctgtgttctcagtgaaactgaagcaatatatactgaaatagttgtgcttataattcttgttgattctcccatagatgacagtagatcatctggttatatttatgcagaattgaaggctcttattctagttggaggattcggaaccagattgaggccacttaccttgagcatgcctaaaccacttgttgattttggaaacaaacccatgattttgcatcaggtaggttagcttcttcttcttcttttgtatttgctcaagttttcacagtttcttttgttctcattatgatgcattcgcagattgaagctctaaaaggtgctggagtgactgaagttgta

SEQ ID NO: 49588 - DNA, 539 bp, Arabidopsis thaliana columbia
ttaatctgagtgttgttgtttcagtgaagcatttagggttcatagtctctctctctctctcttttctgtttatgattttgtttagatttatttgaattgcgctccagtgtcgaaagtattgatttttgtttgacttggttcgattgtgttttcaactaaagaaaaaatttgtttgtgatccttgtgagtgttgttgttccttcgagattgattctcgccggcgaaagtttggttttttgaatttgcttcgttgtggtttgtttcaatctgattgttgttgtttcagtgaagcatttagggttcatagattctattgtctctgttttgtggataaaattgtgattttgtcagatttatttgaattgcagtgtagagtttgagcggagtcaaagtgttgattttttgtttgacttggttttaatttaaggttttttgaacaattgtcatcattttccttttgtgattatagaaaaggagaacctttgcctttacggacatccaaatgagcactgggaagtgaatttgccagctgaagaggt

SEQ ID NO: 49589 - DNA, 460 bp, Arabidopsis thaliana columbia
atccaaaaagacatcaccggtctgcagttcaaggtatcttgtaattgatagagaatcacaaccaatatatatctccaaccttctttgtggtctcatctttgtacgttgtagtggtgctatacgcacatacactacacacccaatatttttaaataggatatatatatatttggttctcaaccaaatgctaactagcatttcatcatataatctacatgccaccaacaatgtgtgttccttttttatccttaatgaactgatttagataaataaaaaagaatttcgaaatagaaattaaaagaaaattaaaagaaaaaaaaagaaaccagtgttaaaaaaaaagcttcgccatcgttcttcttcctcttctgctttttccttcctccatcaccatcgattccaaacatccgccatcaacccgccgacctggatatccatcgcaacaggcggtcgaattagg

SEQ ID NO: 49590 - DNA, 879 bp, Arabidopsis thaliana
cacctgaatctcctcgtttcttgatctttctctcgtgaatctcattctcctgtctgtgttgttctttcaccttctcaatgccttttctcttcatatgtttaaacgtctgcccaaagataacttcttgctctgtttcttcttccaactcaggaatcccttccctctctctcacttccctcgaatcaggactacttgaattcgacttacctccacccatggctggaaaaaacccagctccggcaccggaactttcaccaccaccagctctattataatcataagtatcaaacacattcaaaaaatcccaacttgaaatcctaggcggagacggaggtgctggagtcggcctcaccggagacggtggctctctacgttgctccgggtaaccaaaatacccagtattagcgtttcctgggtaataattagaatacccaactccattctccggcaaccattgcccattctccactctatgattctccggctgaaacactaccggtcgtgacggttgcacagacttcttcataaagtacattcccggattctggttcggattcgggtacgggtttaaattcggattctctcccatgaatccccatccttcaaccggatactgatacccagccgagtaacccggttgatattgatatcccggcgtaaaaccgggctgataaccggattgataaccggattgataaccgggctggtaattttccggtaagcgtgtttctttctctttcactttagggctagtttcaatatggatatgacctaatgaatcatcagatccagattccgatccagaatctaactcggatccagatgataaatgcaaatgctgatcttctccttctccttcgtcgtcgtcttcaataaccg

SEQ ID NO: 49591 - DNA, 593 bp, Arabidopsis thaliana columbia
tcggcagattgggcactcagagcaggcaagtgaacaagatttacagactgcataaaaggagagattgtgatcgttttaggattacttagtacttaatgaaggatcctcaggtaatgtgagagtgagacttacggcagaaatgacggcaagggaggagaattgtggcggtcggcgactcaaaacagactttacatatatgtgagtttgcatcagcattagctgctgcagccgcctgagatttcagctctttctctttcatctcttgcattcttgcctgttatgtatataaagcatcaaatgcagaacaagaaaacaagtagtttttttatttattaaagctcatattgtttgaacgtgtgagatgatgattcatgattttcattacccgtacaagatagaagctcacacatgggtacacaagttccatgtccccgaaaaaccagataaatattcaatacccacaagtagcttgacttaattatccgtaacagtcacttgtattatagataggaggacatgatattagaatatattggatcaggtaaagctatttacatattttgaaccatatatcctgggtgttttgaaggttt

SEQ ID NO: 49592 - DNA, 567 bp, Arabidopsis thaliana columbia
ccgactttctatccaaaaagaaacatatgaaaaaaaagtcgcaaattttcttctaaacatgttgcattttcatggtacaagggaaacccaaacatgaatcttaccttgtagatgaaaatgcatagcctaattcagtccttttgctgatcaccatgtgcagatgttaggtcttgattggtcttctggtatgggaggtctgaaatgtgttggccgtgctgacctgacccttagtggttcatttgctgatatggtcttgtctccaattgccagttcaaggcagagtggggtgtttttatttctgttgacaaatccaggacaactgcaagcatatgacgatacctctctggcttctctgatgtctcagaaagagaataagatttctgtttctccactgccatatccaatggttgtaccaacgatggatcacatatgacagtagcaacgttttctgcattaaatgtgaatgataaaacgtcattagctctttctgaggtagtctctcgacaaattttcctagttgtgcttccattgtgaggcaattaatttatatcttattcctgatagata

SEQ ID NO: 49593 - DNA, 824 bp, Arabidopsis thaliana columbia
cttaatgatcaaaatgttgctattttgttgggtcctaatgggcccatctgtgtttaaagcccatggaattttgggaccgtttttttctttctttttcgtctacacatgtcgttaaaccttgccttcgattaaataaatatctttcaaccctcatgatgttgatccctagaattgcatcacataaataacaaaatgttgttaattactataagcgtttaaatgcatacaacttgatgtataagaaaatgtgtattatctagggatttacttctctaacatatagtttatgtttttaattttgatggtacgtgaagcaggtagtcacttgaaaacccatgattttcttcaaccgttagaatgtgttggtgctaaagaagacgtaagtaggattaactctaccactacagcgtccgagaagccaccgccccctgctccacctccaccgttgcagcacgtgcttcccggtggtatagggacttatacgattagccccattccttacttccatcatcatcatcagagaattcctaagccggagttgtcaccaccaatgatgttcaatgctaatgagagaaacgttttggatgagaattctaactctaattgcagctcgtacgccgctgcatcaagcgggttcactctgtgggatgaatctgcttctgggaagaagggacagacaaggaaggagaatagtgttggggagagagtaacatgagaggtacaagaaacttgaatcgtgatgtttatttagactagttttaaagtagtatttagaaatcaatggaatgatgaaatataagtttttttgaatgtgtagctgatgt

SEQ ID NO: 49594 - DNA, 858 bp, Arabidopsis thaliana
ttcagcatttcataagcagcaaactttatagcgctttcaggagcgactttcgctacatttaacccattacctctgaagaaacccaacaacttatcttctctccatattttcttaatggtcgggacaacacccaaatttgtccgttgaacttgcagagcaactttcagacggtccagaggcgcagttgcggttctagaaacagcccctgctattcctcccgcgagaagtaatttgcttctttgagcgtgtgcacttataccatctggtataacagcttgctctccaatgtctattaagcatactctttcccagtgatgataaatgttctcaattgtagcttcatgagggtttagcaaaagaaaatccctccactcctcaaaagttataattccgttgttgtccttatcaacatgctccataaaagaagcaagttcctcatctttgattttaatgcctacaagaccataactgtgaagttaatttactcacaaccaacggttttgcaaacaagggctatgtcaaaggaatggcagacattgttaatacgttgagaatctacaaatcaagacatttcaattttcaagggatcaacgaacaacaacacacaaattcaagtcaccaaccaatctatcagtaactaacaatttaagcaaaatccacaaccataaacccataaaagtttcctcttttgcttatggaagatagttgcaaagtaacagtagaagaatggaacagtataagaatcaaaaatcacataccagctttatcaagagcctcccaagagtccgctggacaaatgtcgccattgtgttcaatatcaatggcctgaaaaatcttgtacaactcaagctctttagc

SEQ ID NO: 49595 - DNA, 451 bp, Arabidopsis thaliana columbia
gggttaaattctcagtttattaacaattgttatgtggacttgtgatatctttttacttaataacgattataaactaaaatagaaatattttataactaaatataatttattaaattttatatatacaaattctaagatataaattgtcttgcagtgtacagctaattaaaatttagttgtgatattatatccaattatccatataactacactgttttctccacaattagggcgtgacaaatggcaacacttcaatctaggtgctgaacacgatgtgaaaccagactgttctcattgcttttccagcaagtcagaaagtcaaactcaatgagtcctctctcggtcaactttcttcttggtccccatcttcgcaaatcaccactctttttatttcccatgaccaaaaacctgagaacacaccggcgacctgcaaatggatacttcctgtttt

SEQ ID NO: 49596 - DNA, 542 bp, Arabidopsis thaliana columbia
caaatcttgcaatccaaaacttgatattgattccaagataaatgctgtacatgtccgtccaattaatacaacttaatattttactatgatttccactttgcgaatgtaagtaaccttatatatttatgatcattgattccgtttgctggcttttaatgtagattcctagtgtactctgtttggtttctcaataacattattccatttaactcgagtttcagatgtttctattaaataagtaatgaaagcagctctaattctcccaaaattcacaagtatagaaagatagaaagatagaaacagagttattgcatggaagctgaaaatcatacagcatggtggatataaccaatgagacacaaaacaatcacggcatgtgttatagaacaacacttatcatctgtattaacataaagcaaaagttcctatacgacatagtccaaagttacagaccataagcacaccttatgatttgttgtacctctaaaacacaggatgatgacaagaagcaaatttgcccaaatttactgagggaaaaacga

SEQ ID NO: 49597 - DNA, 877 bp, Arabidopsis thaliana
tgagatgaaaataaacaattctcatgtgcatggtattagcattcaaagaggagacatcaaaaaccaaaaattgcggtcatagttacctgttagagagaagcacttcaagttcatagtcagaagcacttttagtgacatctaccatgacctgaacaagctcagtcttcctagtgctggccatgaagagatcatattccgtgggaataatgatagcgaagaagttatcactcaatttgcttaaacacatcttctctactgatgacaaagcaattctcctggtcatagcttcagtctcgggatcaattagatagatcgcaaaatcagtgaggataaaaatacgccgtttcatcttccccgagccggtgaacttcaaaactttatcagcaaaaagaatcgatgtatcacctataacaacaatgaatcaccttctcaacatcaaacacatgcaattcaaggtgaatccaatcattagcaatccaaacaaccacataagaaactataaatcgatgccacaattctacagctgattcaactattcctccaagttcttcgattcacaaattgcctctcaatctcaaattcatcaaataaaaaccaaaagtttggagaaacctaaccttgtttctccagaattcgcatcaatccaggacgagaagaaacgtgaagatagtcaccacgatgctctctatagcgagacgctttccttctgactttacctccagcgaatggcgtgtgatctcctccgtctacctcacccacacttcgatcttcatcaaaatcaggtggaggtgattcttcgccgtcgaacttcggccccttttgctccttcaaccggttcattcctccggcgacgaactcgaaatcggaatcggttagc

SEQ ID NO: 49598 - DNA, 369 bp, Arabidopsis thaliana columbia
gtgattccaagtaatatatacatgttgtctgttctaggtgatacaagagttgaacaaatctaaaagatgggctgggcttcatgtagccgatagttcttgcttccattatcgcagagtaagggccgcatattcagttgacgtgattgtggtatagtgagcgtatacatcaatctaacttactccaagttatgttaggtcttggaagtaaaagatacaactatcattctccattgaatctggtgaagttttccttccagcccaactgatttgttttcattaatgtccagcggctgatgctcaagattctggagtcactttatgtgaaaggaagcagcgcttatgataaaactgaggcacgccaaatctgga

SEQ ID NO: 49599 - DNA, 540 bp, Arabidopsis thaliana columbia
taatatctaacatccaagtggctggattacaattcttttggacttttggaactccagggatgctctgttaataaatagaactctaagtgttagttttttttctaagaacccagccgagatgaaactagtctagtattgtagacaaactgacctcaaagtatttgataaccttacttgaatgttttccaagaggaccatagtagacaagctgtcccccatctttcatcaggatcagctgcaattaagggaataagaagctgctagggggatcaaagtttagattaatgtggttaaatcaatgatttcagccattttacctcatcaaatgtctcaaagatatctatgctaggctggtggatcgtgcaaacaactgttctcccagtctcagcaacatttttcacagctctcataacaatggctgcggctcttgcatccagccctgttgtaggttcatccagaatatgatggaagggttagaaacaagttccacggctattgtcagcattttgcgttgttctgtagataaccacttattcagga

SEQ ID NO: 49600 - DNA, 578 bp, Arabidopsis thaliana
cccgcgagaaaaaccaacaaagaacatctcagaaaccttgagaacgttcttagaacttcgtcaaactctatagatcatatcgaaaatgtaacttctcgtcaagagaagacgacgaagaatacatcgacgtcatcacttctcggaggtttgaatttggcgcgaatatggcctcagatgaaagcagccgtcgacgaaatgtcgccaaagaatctgaaacggctccaaaggcttctctcaaagtcatccgaggaacgttcgccgaagagtaaactcgggtctaaatggcgggactacacgggttaaacaactgggccgggttgttggatccgttagacgagaatctccggcgagacgttgtccgctacggagagtttgtacaagcggcttatcacgcgtttcactcagacccggaaggttcgccgagacacgtggcgttacctgatgggtcatttaaagtgaccaagagtctttacgccacgtcatccgttcgtttcctaaatggatcgatgacgttgcaccggatctccggtggatgactaaacagacgagctgggttggttacgtggcggtgtgtgatg

SEQ ID NO: 49601 - DNA, 541 bp, Arabidopsis thaliana columbia
tgaacttgaactttctgagactcaaaattttgtagggttctaaagatcacaagagtatcaactttctgaaaacttactgggatcggtggtggtaagagtggcagtaccagtgaagttacaagactcagaagcttgacctttcttttggaagaagctattgactgcatagttgcaatgagccctaacattgtcaggattgaagcaagagccttttgggtgagttgggttacagtcagctccatttccacaagcatagtctaatgtcttttgtagcactgagtcactcagccctgttttgcacacacaccatgaggcacctaccaaagaagaaaaaaatgggaacaaaattgtaagtgaagccagtaagatttgtaaatcttgtttcgagaggttaagatgtttgcaaatcatcaacaagagttgcataagagataagtaaggtagttcatttgcgaggaaagcaagctttgtagattaagggtttcttaaaccagagagccagagctgaatgtgaaagggtaagcgagagtgagactgagag

SEQ ID NO: 49602 - DNA, 335 bp, Arabidopsis thaliana columbia
atagctatgatgacgaaatctcagcagctcttccaaagtctcatgttacttccaaacctcattcatctgaataaatatacattgattttcactataacataaaaggacaaatcaatgtgccatatatatgaaacaacttttttgttatatatatatatataagcggaatatatatgatgtatcttaactttaactcaataacaatatcaaaatctacaaatctataaaactaaaattcaaaaatagagataaaaaaaactaaccttaacatatatatttcggaatacctacaatgacaaaaactataaaagaataaatatgattcagtatgaagc

SEQ ID NO: 49603 - DNA, 581 bp, Arabidopsis thaliana
gtgtgctctaaagagtcagaaataatgtggccagttttgtcattttcataggatgctcctgttatggtcgttatgtcggataacctcttccaacagtgcatttgcaggtgaatataaggcattggtttaagatttcagccaggttatgaaacgcagcagagaatcttgaaataattaacaaacaaaggagttacagttagaaattgtaggagagatctcgtttttcgcgacaatctggcgtttttcttgctaattccaggattaatccgttcatagtgtaaaaccccgtttacacattctgacggaagatatagattggaagtattgcattcactaagataagtatggcaacactggaacagacatgaattatcagaacgacgatttacgcatcaaagaaatcaaagagttacttcctcctgtcgcattgctggaaaaattccccgctactgaaaatgccgcgaatacggttgcccatgcccgaaaagcgatccataagatcctgaaaggtaatgatgatcgcctgttggttgtgattggccatgctcaattcatgatcctgtcgcatcaaaagagtatgc

SEQ ID NO: 49604 - DNA, 535 bp, Arabidopsis thaliana columbia
ataaattgttatataactaatttttaaaactaaaatatatatttaaataaattattgcaaccggtttattgaatcaatgcaacatttagttcttaagttaagtaattatgtgcattcttaatgtgaattagtccttgtggttctactcttaattgcttcatcgataagatcgctagtgcattaagattattaattgagtaaatcactacatcagtttgtgttattgttttcgccgtatcatcacaggaatttcttgtagtatagagtcgatctagaaagcaacatcctccgcatcatcagtcaaggcgccggagacatcgatccactcaagctgcagctctatctcccctcgttcaacattctgaagcttaaggaacatgttctggacaatctttcctttgtgccatacaatcttgctctcttctgacaagcagttttgtctgcttgcctgtatcttcattattacagtcccctcaggtagtcctcctagttggttttggattctgatggcttcaaggaacggatcaatgtgaaa

SEQ ID NO: 49605 - DNA, 569 bp, Arabidopsis thaliana columbia
cctccagattttgacagaatctcggatctccgtgaagccggaagagacataaactctttaccagtgaagctactctgcgaaagatcttcattctccgaaaacaatctaatttcacaacaaatagcttcagctgttgatttgttatctccagttataaccattactcttatccctgcgtcttgcaatcttcaattgctcttccaacttcttcacgcggaggatctcttagaccaacaactccaacaaagattagatttgtttcgatgttcgaatagctagaagggtccaaaagcttcttgtgtgaaggatgttcttcggaagagtaatccgaaaactctcctaattcgtctttgtaagctaatcctaaacatcttaatccttttgaagtcatttcagaatgtttcttaaggattacttctctgctagattcatctaaagctacaagagatccatcagcaagctgtgcaaaagaacttctctcaagtatactctcagcagcaccctgcaaagaaaaagaaaggggagattacaaaacgttcttcaccaaaacaagagaagagaagtaataa

SEQ ID NO: 49606 - DNA, 1267 bp, Arabidopsis thaliana
ctattatttatcaacgaactgcatcttcccgagaaactggccggtgtgatgatggggaccgccgccgggctggaaatcccgacgatgttgattgccggatatttcgccaaacgtctgggtaagcgtttcttaactgcgcgttgctgccgtgggtggcgtctgtttttacgcaggaatgctgatggcgcattcacctgtcattctgttgggcttgcagctgctaaatgctatttttattggcattctgggcggcatcgggatgctctattttcaggatctgatgcccggtcaggcgggttcagccaccacgctctataccaacacttcgcgcgtgggctggatcatcgcaggatcagtggcgggcatcgtcgccgagatctggaattatcacgctgtgttctggtttgcgatggtgatgattatcgccactctgttttgcttactgcggattaaagatgtttaaggcgcggtcagcatttccagatcgataagccaggtcatggcctgctgacgcgagttaccgcacatttcagcgctggcttgtaagcctgcacagactttcggtcgcagtggcgaggtgaaaattttacagcgttgctgttcatcaagctgaatgcagggcgtattggcgggcttgcatctggcataccgggaatagggctggaaattgaaggggcagtgcaacacgccccgcaacccggacggcattccatacgttgttctcttaaggttaaccaccggattgatgagcgcgcacagtaccaccttttttgcaccagcaaaagtgcgaataccacttgcccgaaaggcccgtcgcgagtactttgtcgcgatatttttgacattttcgactacaggaatttttcgatgccaagagcgaacgaaattaaaaaaggtatggtactgaattacaacggcaaactgctgctggttaaggatattgatattcagtcgcccactgcccgcggtgccgctacgctgtacaaaatgcgtttttctgatgtccgtaccgggctgaaagtagaagagcgtttcaaaggtgatgatatcgttgacaccgtgacgctgacccgccgttacgttgacttctcctatgtcgatggcaacgaatatgtctttatggataaagaagactataccccgtataccttcaccaaagatcagattgaagaagagttgctgtttatgccagagggcggcatgcggacatgcaggtgctgacctgggacggtcaactgctggcgcttgagctgccgcagaccgttga

SEQ ID NO: 49607 - DNA, 478 bp, Arabidopsis thaliana columbia
ttgttttatactttatatacttcttcaagtcaatctcagtctcatttcgaacttcttcccaacaagtaacgacagtttagaaacctccacacttagaaacctcggatcatcattgtccgaaaccgtctttataagagagattctaggactcctcaatctctcacttgtcctaacctcgtacgttttcacgttctccacgttctcgaacccaacaaacgtcactttcccgatgctccatttcattttcgacgcatactctgggttcaccacttctgatctcagtacaacggattttccggtcacatagcaccggaacttaacaagggtccaatcacggtttcctcctccagctcccatccgtaaattttctccgtcatcaagaaacagttcgccggagatgttctcaagccggctggtacaactagaagctgatacggtgtctttctggcgtccctagtcgtcaatgcctctccttgca

SEQ ID NO: 49608 - DNA, 492 bp, Arabidopsis thaliana columbia
agagccttattggacagaccatattgacttttatggtcctaaatgcagtgaattatctctcttcgacttggcgccaagacttctgggccagaaataccgatgcggggctatacgaggataatgatctgtttcaaagcccataattaaagacctaggtttggcccattagtctatcttcttgatttaaaagaaggaagccaatttcttcttcatggacgtaaataaaaagaactggtaactaatgagatagtatcttactatcttcacaagtaaaagtcatatggtgaatccgaagaaagaatgtcgtattcatgagctatatctgagaagagtgaaaaacagagtcaaagtcaaagagtgatgagcaagctttaatagtacgaaagtagaagaaataaagaaataagagggtgaaatgggtaaattttggatttttaattaggaaatagtgcaaattgactaaaattaaaaatctccactcttttcgcgtgt

SEQ ID NO: 49609 - DNA, 512 bp, Arabidopsis thaliana
ttgttgtcgaacacgtcaggactccttatgtcattcacttgcgtgttgctcgagtttgcggtgggacaagtgcgtttgaggctgttggcgaagaactggttcatggttgggtcttggttcgggtagagtcggtctgtgaaagacggacaatgcgcgattccgatggtgtgaccaccggaaagtgctactaagtcggtgatgttgaggtttctgttggcgaagtcggcgatgagctgactcgcgttgaagaacggtggtggtaagttatttaacgtcgtttcctggctcgcgaacgctagagagtcacgtcggccaagtgggacagcatagtctggccctcctgactacattgacacacaaaaataattatcatgttagagaattagtgtgacttgtagactaatggtttgtattattgcatgtaaccgcaagtcataatccaaggttagttgaaactaaatgtgattgagttatagacgaaaaagtgatagatgtggttactaggacgacgg

SEQ ID NO: 49610 - DNA, 819 bp, Arabidopsis thaliana columbia
aataacgtacatgctgataaagatgattgttctaaggtccacaataactcatcaaatatccaggtttacatacctcctacatttgcaacgtaacctttcataatttctattttgacttcacgtcatgtaaatttctgcgtactgcaggaaactggtaaagatgacgaggagagtgaaatatggcattatcgagatccaacaggaaagacccagggaccgttttctatggtgcagctccgtagatggaaatctagtggccattttcccccttatcttaggatatggagagcgcatgagaaccaagacgagtctgtgcttctgactgatgctcttgctggacggtttgataaagcaactactttgccgagttcttcttcgcttccccaagaactaaaaccgtctccacacgattctggccgcactggcgcggatgtgaactgtcttcagaagaaccagatgccagttaacaccagtgcaacctcctcttcctcctctactgtcactgcccattctaacgatcctaaagagaaacaagttgtggctcttgtagcttgctctggaaaagttgaggatggtaattctgttcgtccccagcctcaagttagttgtccggcgtcgatctctgtggttcctggacacgttgttactcctgatgtaagagaaactccaggaactgatcaatacaatactgtgcgggcagatggtaaccataacacaactaagactctggaggatgaaacaaatggtggttctgtttccataaacggttctgttcatgcaccaaacctgaatcaagaaagtcatttccttgattcccta

SEQ ID NO: 49611 - DNA, 726 bp, Arabidopsis thaliana columbia
attttgaagaattatgaagaattcaattatgtttttgcagatgttatagagaggcttaatgttcttagaggtagaggaatggcttcaatgtattcttggtctagtaagaggtatctatataactgtcttgatttcatttatcacttcttttgtagctttagattcaatgttctgctgatttaactctgcagaagctataggaatggttttgtttggcatgatttatcagaagatgatttgattttaccagctaatgggaatgagtatgttcttaaaggttctgagctatttgatgaatccaattcaggtgaaaaaagcaaacatttttttgttaatcttttgtttcaatgaagaagccttaagaaaacctatgttgttgtgcacagatcactttagcccaattgtgaatttagctactcaaaacatgaagcagatagttgtggagccaccatcatctagaagtatggatgattcgtcttcatcttcgagtatgaataatggtaaaggaactaataagcattctcatgaagatgatgagctttctcctccagctcttcgctctgtttcatcttccggtgtatctcctgattctcgagacgctaagaactcatcttcctggtgtttggctgagtacaaagtgtataagagcgagggactcgcagatgcttctactcaaaccagatgaaactgtgagtggtcgttctaaaacacctatagagactttta

SEQ ID NO: 49612 - DNA, 604 bp, Arabidopsis thaliana
cgcaacacaattcaagtaatgaagcctcaaaactctgcagtttctctgaactcagcaaagaaacaaatgaaagcccaatgcaggcccaagaagcccacaacacaaacttggaagcaacggtcatcttctccaagtaacgacaagaacagagctggcaacctcaagacaagttcacctaatctcagtacggaaaaggctttcaacatcaagcttgagaacaggttcctgacccttgattcagagagtccagcttgatgtgtgacacctgtcgtttctctctagggttttagctatgtctctcttgttgtatataaacaaaaccccatcatcttttgtaaagttaagagagtattatcaatgaaaacctaaagcattgcttttgccttcaggaataacttagagaagttaactgcgtcggatattacctcaaatcgtcggaggatgcggtcggagtctgcgatggttgttatcagaaatggagcttcgcgtaagaggcaacggtggtgtgtgacatttgcaggtaaagatgatgaacatccaaagggaataaaaagatgttttcacgatttgttggaaagcgatatcattggaggattgtgttgtg

SEQ ID NO: 49613 - DNA, 1045 bp, Arabidopsis thaliana columbia
caatgttttgttttgtcctttcgatggtctataaaaggtgacaacaagaaaagttaacagaaaaagtacaactagatatctgggagggggaaaaaaatgtcactatgagctttcaatcaactaacctcatcaagtaaattgcagagtttcttcactttggcctctgttagtgcaatctctttagcattttcagactcatgtgttgatttggcatctccgttttgttttccgttgtgtggaggtctggcaaaatgtttcttatccagcttttccaaaggcgtatgctgtacaaaaattgaattaattaagggaattagataacctcaaggtaataagaaaagcttcaaatagaattcaatccctacaaaacatgaactatgacaacaaaagccttagtttcatattagaagaagagctgagctgaactaccaaactaggtttcataacagctaaatgttccttccaaacccagtaagaacaacaagaacgcggctactaattgataaaagtaccctctcataagacgaaacttaaagaaataggagattatatagcaagtgtaaaaacctttgtcaggaaaagtctctcggcacgctgctgcggagtaccaccaaccttcagtcctaatgcccccaatgcctgaatggcatacaaagaacatatgattaggggaatatgcttcaaaaaggatattaacatgaagtagtatggtcattacctcttttagcttttcaggtcctacatctaccagttcctcgactgtactgtagtaatcaagatctatgacagtatgctgagatggaataagttcattatccaggccttctactattccatctgcatattgctcttcaaaatcagaacaaacctgtaaaagaaccaaacatattaatcgcaacagatcaaacaataggcacagcattggccaaactagaactaccagaatgtcaaactataacatggttcaaaaccttccgaggatatacaatctctgcacttagagcaaactatgcaccaatgaatattgaatacaaccatctagtta

SEQ ID NO: 49614 - DNA, 622 bp, Arabidopsis thaliana columbia
cataatcgaagacgtttttattcagcaccaaggaccagagatcgaccggtttgttttgtctctcgaccataccggcgtggaggataagatactttcgtgggtcgatacgtgtcttcgtaaaaacatcaaagagcttgtgttggatttctcaagcgtccaagaatggttagtggagatctccactcaaatttctcatccagcgagacacttactgttttgaagctgcaatggtgtagatttgaaataccgaataatcttccaaaaggtctaaggctcttgaagacactttcgctcatgcggactgaggtaacgaatgaaatgatagattcaattttcaacaactgcatccaccttgagtcgcttgaactagtcaaatgccaaatgtctgggaatgggatactgaccatatacgctcatgatcataagaagttcaagtcgttggtcgtgtcttgtatgccaaatcttttgagcatctttttggatgcaccactcttgaatgttacaagtatgatggatatgccaagaccatcaacgttttaaaggttaatgcacttgaagaggcagaatttcattatagtcgaagtagaagaaggcattcttctgacacgggtggttgatagta

SEQ ID NO: 49615 - DNA, 314 bp, Arabidopsis thaliana columbia
aatactccagggttacaaaggttgaagagtctacatgatcgctttccattaaagccagtagtccgtccaactagacagagaaagcatgttagagagcgaggcaccaagtcatctctcacggctccaagagatcaagcctagcgcagattgtactcttcacgatgtggacacgcgcgaagtcagacacatgctgacagctacgagtctgttttcgatcagcataaacagtcattgggcgtctgagaatggtccgccgagatataagccacaggagtactgtcagacgtgcatcaataggctcatatacgaaagcg

SEQ ID NO: 49616 - DNA, 423 bp, Arabidopsis thaliana columbia
tgatgtaattagttagagctaaatagtgctaataaatatatgtaagaaattgttcggaaagtaactaaaaaaagttcaattcatgcaagtagacacttcaaatgtgataaatgtataagtatgatgttaagcatgtgacccttgagagtcgattagggcactgtacaagattgacccaaatagttacaaactacaagtgaactctcttccattacatatctacgtgtattgaggggaccattatcgtacgtatacacgtatatatgttttgccctaaattcccaattttaattcagcatgggggacggactcattcaatagcatcgtctttcagttaccttcttgggtttagaatctcagtttagtttctgatccaatataaaatgtttgatcaaagatcaaaaacttagatagaatcaaact

SEQ ID NO: 49617 - DNA, 496 bp, Arabidopsis thaliana columbia
tgttggtaaagtgaaagcgcgtttgataacctctttcaacagtcagcttccaggatcggctgttctgcctagtactctgtttggctcaaaccctaccattccaaatgctgttttgaccaaaacgtttaggactgatgatgttactgtgaacaaactcaagtccaagtttgctgtttgaatcttttgatattatattatcatgttttctcaaatgatctttcttaattcgcttcgatttcatagcatagcaataagttatgtgtaacgattggtatgaaacaaaagaaaaaacattaataagattcatttctttctcttgggggatttatggtgattctcttagactaaaagtcgaaaactctgatgtcaagtaatcagtttttactaatcaaatcattttgtgcaaaagtctctcttaaaaactttagagacatagtgatatgctttggctaatgctcctgtttgtagcctaagaatacgactgccatagtttaga

SEQ ID NO: 49618 - DNA, 508 bp, Arabidopsis thaliana columbia
taaaaaaatgcaagaaaaaaaacaagtatacatagaaagggattctgatatgcatgttactgtaggaaaacactagatagtttattctcaaaaaaaaaaaaaaggactaagccaaagcaaacaaattattccttttccttttcagcgaataaaccatccactgtttatccaaatgaacagtcctgataagatgctcaacaagcgctaacagatatttactttgctttacataccagagtcagagaatgctgagctagatggtctttccgaaaccatgtttgcagctgatcgtgtatctaatgcatcatcaggcaaggaaattgactgattgcaacggctctctgaattccttactagctgatttttacttcgcttaaagtacccatcagaggaaggaatctggttctgacttacatcatgaatatctgaagctgcaaccaactgatttgcctttctcttgacatataccattctcttcaaatttgaagaatcaagtcagacgggattc

SEQ ID NO: 49619 - DNA, 547 bp, Arabidopsis thaliana
cttctatatgcacacgacacgacacaacacgggctataaataagttaagacattgctcctcctcttctcatcacttttccaatctctcaacataaaatcccacaacaattcacaacccgaaaaaagacagagacaatggcacagcccatgcgcttcatgctcaatcatatagaaacagaatcctacggcgctttcacccctcaaaaccttagtccgctgatcaatcgtgcgattccacacactcgagctcaaatctccggatcacctgtcgtagccgtcggccgaggatcatcaggtcggaccttctttggcgtcaatgtggaattaccaggtctgcctcttgaccactccatccacgccgaacagttccttctcgccaacctcgccctccacttcgagcaaaaactcgaatgcatagccatctccactaacggctactacttccaggagccatgcggccactgctgccaattacttcataaaatcagagatatgtctgatccaaaatcttgctcacgacccaaccggtcagaaaggaacatacatg

SEQ ID NO: 49620 - DNA, 575 bp, Arabidopsis thaliana columbia
taaatgtaaaataggtcgacagggctgcaaggtgcgcatagtcagatacaagtcctacagaaggaagtagcagaacaaaccaaagaggtgtgttatattattggaatgctcggctcaatttgtccatgacatttcctgatattagcgcaaatgattattctttgtttcattacttctacctttgtcttccctcacttacagattaaacagctaaaagagtacatctccgagatcttactgcattctgaggcccaatcatctgcttaccaagagaaggtattagatgtgtagactttagcagtcctctgcacttggcttgattgttgaataaattagcaccagcagattactagtttccgcgctacacattctgctcatatttgtgtctctgttggcgttcttgctaaaaaaaagccatgtcatgatttgaaaaaagaatcaagaatagtaactatttctgatttctatcgtgatgatctgaaggaggcaaaatttgataacaatggtgtatatttcgattagcacctggaagagttgttttccttatttcgtagctcatatagtttctttgttcc

SEQ ID NO: 49621 - DNA, 465 bp, Arabidopsis thaliana
aaaatccataatcgtctctctacagggacaaatatttttgcggaaggtaggtcgaaagagacatgtcgcgctggcgggatgggtccgtgatcaagagtttggtactagacgcatttcggatttcttgaagaagttggcagcagtggggacatggagggtcgaagtaggagccgtttgaggagaaggctaagcagttgagtgttcgctcgttgttgagggcgagatggacgacaaggaactgcccggcgtggatggagtggagaggagacaaacctggtaattccacattgacgcctaagaaggtccgacctgatgatcctcagccgacggctacgaggggtgactgcgagggtagagcctgagcgagtggaagcgcccgattgatcagcggcaaaagggtttcgggctcgaaagggccggagattctgcttctgttggagtgagacggcataagggtttgggggt

SEQ ID NO: 49622 - DNA, 562 bp, Arabidopsis thaliana columbia
gtatgtatattcattgtgggaaaaatcatcgtactacagagggtattgtctaactgttgtgatttttctgaattgagtttagatactttctactggacttggtaggatagtgccaaacttgatatcgaggaagcacaccaatagtgctgctacaggtatgtagttctctcatatggtgtgagtgtgacattgccaatactatagttttgggtttttaaagaatttgctagcttaaatgaattgagagtgctatgcaactatacgatcatgaatttttgtcttatggaaaatgttctgtccgaggcttaaaccttgtccaccaatcttttagtgtgtcttgtgattatgattttgcagctccggtttacttgaactgtatatcttagtatctaagtttatttgacatggtgaaatggtaggataattgattcatttagtagaaaagtagctatccaaactgatttcttcatgtctttttttgtgaatatgtaaaacacttaaatgttaagagtagatatctgtattatcattggaattggtgcacttacttgtaagtattggt

SEQ ID NO: 49623 - DNA, 614 bp, Arabidopsis thaliana columbia
tgttggagactagggaccatctgctcttctcatgtgtttactcctcagcagtttggtcggccgtagcaaagaacatcttcaagtccagatactctacggattggagcagccttatctacatctctaaatgcaacataatcggatagagagattcttagctcgatacatcttacaagcttcagtctatacactttggagagagagaaatggaaggaggcatggtgaggaccctaaccctgcagctagactcatacggtggatcgacaagcaaatgcgcaatgctctttcatccatcaaagagatgggcgatcgaagatatgatacgggactacaactgtggtttgcaactgcaaattaacctctgttgatctttaattttctcagctgttttcaatctaaaggtgcacttgttgtaagaaagatatttttacttttgaatataatttaacattacattcaaaaaaaggagatagggaatttcgacgattctccagagatcaaaactaagtacacacaaagagaccatatggtccaatcagttccagatactcggtgcattgcttctgttgtgagcataaatggcaaccctatgaaagaaggttgatgcattagag

SEQ ID NO: 49624 - DNA, 570 bp, Arabidopsis thaliana columbia
agatgtgtcgccgccattagagagaagcagagtttaagattctgcagcgatcaatatttacttctgatcgggaaataaaccaacgacggaatagtttagtaaaataattaattcagttgtaacactattattatgtactaattgcaattaattgatttcgaagaacagagagtgcaagaagatcacgtgtgacacgtgacagtctgttagcaaaaaaagtacaatagtcaaaaaatacacactcacttgatttcttccctttttcagttttgtttccctattggctactttggatcccttttagattctttatattctctgatgttatcgccggccaaatgtgagtcagaagaggctcaagctccattggatctccattcttcttctagatctgaaccggaatgtctctctcttgtcctctggtgtcccaatcctgaagaagctgctccgtcctctactagagaactcataaagctccccgacaacggagagatgagtttgaggagatcacgacgcttaattgtaattcgcctgaagagaacggaggagaagggagagtttcgcagagga

SEQ ID NO: 49625 - DNA, 548 bp, Arabidopsis thaliana
ctgaaacagcttttaacttaggccatgtgtattccgctactggtttagcaagactaggatacatccaagggcatcggctttgggcttatgagaagctaagctcggtaatctcctctgtttcgccgcctctcgggtggatgtatcaggaaaggtctttctattgtgagggtgacaagaaattggaagatctcgagaaggcaaccgaattggatccgactttgacatatccttacatgtatagagctgtcacacgaatgtcgaaacaaaatgctaaggctgctcttgaagaaatcaatcggatcttggggtttaaacttgctttagaatgcttagaaattcggttttgtctttatcttggtatggatgactatgaagcggctcttcgtgatattcaggctgctcttacgctgtgtcctgattatagaatgttcgatgggaaagtagctgggaggcagctccagacgcttgtgtatgagcatgtcgagaattggacaaccgcagattgttggatgcagctatatgagaaatggtctaatgttgatgatata

SEQ ID NO: 49626 - DNA, 501 bp, Arabidopsis thaliana columbia
tttttggtaaaggtttgtgtaaaaaaattttaaatttaatattatttagtttttaatccctacaaaaaatatctaaacaaaatattctatagtacaaaacttacaaatcatcaaataatatttaatccttacttaaatagtttcctttcgtgaggtccaacttcttaatatttacacttgagtaattgcataatatgtctataaaaacttaaggcccaataaccatccaaaaactgcaaacatatccaactcatcatatgtctaaagaaacttaaggcccaataaccattgaaaattcgtgttttgtccccaagcaaaatatatatgtaatcgaaagccgtatttagaatacaataactgcgtttctgcgtagaatttaattcgaagtccaagctcaaactaacacaactagccatcctaacataatcaccttggaagaagaatttccaaggtttcatgttgactggtggtggcggtgtagaatgcagacatgaagaattt

SEQ ID NO: 49627 - DNA, 548 bp, Arabidopsis thaliana
gtagaataccactggttagcgatataccgacaatcatttttggcgcagacgtgactcacccagagaacggggaagagtcaagcccttcaatcgctgctgtaaggattatacacttttatcaagtagtggagcatcgaaattcattatactcagtttttttcttttgttttctttaggttgttgcttctcaagactggcctgaagtgacaagatatgcgggtttagtttgtgctcaagctcacaggcaagaacttatacaagatttgtataaaacatggcaagatcctgttcgcggtactgttagtggcggtatgatcaggtaataactcgcaatatttcggtttttgtagtttgattttatcggtgtatctcaaggtttttttgcttgctttctacagggaccttcttatctcatttagaaaagcaacagggcaaaaaccgcttcgaattatcttttatcggtaagtctctctttgctcatttaagtagaagaattatatctgcacccacaattagttctcatggttgttttatcgcgcagtgatgga

SEQ ID NO: 49628 - DNA, 1134 bp, Arabidopsis thaliana
tgatcaatcgtcatggctctctccacctttacaatcgcattctcaaatctgcaacaaacctaacatctctactcactcacccaagaaccaaacaagactactaataaagaatcaaaaacaccattcgaagtttaagcatttcgaagctcaccttcctaacgccatatcaacttgagcttgaacacagagcacataagcatcacatactataccaaatagtttctcaggtggttgagtatggtgatgatccaatctcggaatgctggatatacacaaatctgaatcctttatctgatgaagccgcaaaaaggcttcagctttacaagctacaagctgcacaagatcaaacctcattgtttaaaagataaagtcttttcgctgataattcaaccacaaaagaggcaatcaatgccactttttgatctctaacctgaggagaagaatcagctccatttgcaatggctgcatcgatttcgctaatcaccgttatccaatcaccgatctttcgagcctccgtacacagtctgagatgcttctcaagcgtctgcaacctctgcaaatcagcttgatcgggacattgtccggaaacacaaagatgacgtctcgcattctcagcttctcccaatctaaaaccaaaccaatcaaatactaatcctttttcaatcaaaactttttaaaggatagaattttttttaccttagataaagagaagcgagtctctgatgagctctagcgtaagaaggatcacatctcacagcttcaaggcattctttaactgcttcttctaacctccctgacgcagccaacgctgccgcacgattgcttctataagctggattttccggtgacaatgagatagctctgtcgtaaagagccaatgcctcggcgtaattccctttcctatacattacgttacctgccttcttcacctcctctgagtcactcatttccgccgccgctttcgtcgcgtgactcacctttccgccggtgcggatgatgtttccgtggccgtagttggccgtgcctgtgcatagagtctcgggtctaacgaaggctcgtgtagccattccggtttctaagatccttcccgatggacaaatgtttctggtaggtaaaacgccggggttcgcgaag

SEQ ID NO: 49629 - DNA, 1485 bp, Arabidopsis thaliana
  unsure (1)..(1485): unsure at all n locations
catcatattaatttggcatatagtttccaccactgtaatatcacttataacaacatgttagggccaattgttaaaaggggtgtcactatgtaattaaaagtgaaataaagatctcttctcacctttaaagcattctgcccatacaagttaatggcttgatcgatagctgagtaaacatcaaaggcctgcttgctgttgggaatgcatttgacaacacggaattgttccttcgggtcatgtggctttgctttcagatagagaataagccgcgaaggtggagagttaggtgggtcttttttcccgtcactcagttccatggttaccagatcattccatagaatatcccactgtatagaacacgcatcttttgccggaataaactttctttggcccattatgttggagggttgctggaaacattaaaagtttggaaatttcaatagaatttcttggatagatacagaagacgaacactatancaattaaacatagagagcaaaaaggttttgtctaactcacttgtagcaatatcactcttcgatgtgtgatcatcagaacttttccttttggtaggatgaaatgactttcgtaggcatctgttaatgcaaacttcccacgtactttaaacagatcaacctggcccaggaatgatccagattctgccaactgcaatatgacctgcaaatgcaaaatattggaggtttgaaatttgtataagaataatcatatgctacgtaaaccaaaccaaatatattataagcaccagtaaatccattcctcatcagctaaccaagagcaaaacgactagtgcaagccacgaaatacaaatttgaacatatttacgggtaaaaattgtacctgcccctgtgccctgtaatcattgtaaggacgaagcaagctatcagcaccaaccgctcttggaagtctccggcgaagaagttgttcatctgaggtgatggcagctgctattttcatcctcatggcatttgcaccttcagtggtctttgacagaagatccagaactccgctcacaggctgggcagcagcaccaatgattcctttcccaaacccagagacaaagccttcgacaccagaagactttgcaccttcgagaggctttgtcaatatgcctgtgactcctctaaacaggcctttcgctagagctccacctccttctctgataatatcgccaaagtcctcaacacctttgttttcctgccaaatcaagaaacgcattagcgtgtactaacaaaatggagcacaggaaagaaacactggcaagcccatacatccgtttagtatcagaagccattcaaaaattcaagtgttaagaggaaaattttctacatattaggctaatggaaggcaacttggattgtttatgttgtatcacaggaaacagcaacatgtagaaggagaaaaaacaaagtctaggaagaaacctgtctctgtcgactttggatgaattttttatccattgataat

SEQ ID NO: 49630 - DNA, 918 bp, Arabidopsis thaliana columbia
tatttgatctcctaaatacatgcatacacctactaattaacgcgatgacgatgaataatttttctaaaaataagcaatacgattgataaaaattaaagatacaaaaagaggcatataaccttttgattgtatatgatttgaaaactttttcttgaatcattaaaatagcttaattaccttttgcataaataaactaaaattatacgattttagatgcaataattaattccaaatcttaaaacatcatttcctcataagtcataaccttttaacttacacttgtaattttgttcaacatggattactgagatccgaatctgaaatatttatacctaatcaatactctgacctaccgtacgtatgaaactgtatttaaattgttactacatgaacatgatatagaactatttttataacgatataatacacacgaaggttagtaagattaacaaacatttaaataaagtaatcattaaaagaaacgacgatgaaggtacctaatcgttacattagaaggcttgtatataaaacctcaacaaaacctctccctttcacttcatcacttcaagtcttctcttcctcgttgatcaaacattttcaagtactttccggcgaaacatcaatggccgtttcgaattctttaacaatctctccgaggaaactccggtctgatctttactcatactcataccaaaacaattccaagacacctctggttatctctgttctatcgtcactgattgatcgaactctgactcgaaacgagaggattagccggagagctttgccttcctccggcgccggtggcaaaactcagatctttgattgccgagaaatccctgatatgaccatccagtcatacctagggagaattttccggtacactaaagccggtcttcggtttacgtggtggcttat

SEQ ID NO: 49631 - DNA, 467 bp, Arabidopsis thaliana columbia
tgatctcgatggaccgatacctgaaagtcttcgaaacatggatccaggctcttttgcaggtaacaataaaaatgttctacatattaatattgtcatataatgcttttagaatcaaatgtcaacatgacatcctttttaggtgtgcaactagagaattcattattttcatataaattttgcataaacctttcaagagtttgatgcatttttgatgacatgaatattctatgttttgtaaattgtaggtaacaaaggtttgtgtgatgctcccttaagtccatgttcctcttcctctccgggggttcctgttgttccggtatctcccgttgatccaaaatctacttctcctcccacggggaaaaaggccggatctttttacactctagcaatcattttgattgttattggcataatactagtgatcatcgcgcttgtgttctgtttcgttcaatcaagaagacgtaatt

SEQ ID NO: 49632 - DNA, 552 bp, Arabidopsis thaliana columbia
tgttttgagatcctttaatgatacttcttgaggtttggtttctctagagattctaatgcaacgtactgaatctctagcaggtgttttaatatagttattcactgtcctcattgcaataaaacctataacgaaaagcagaacgactactccaattggtacaccaatggcgatgattatggctatgtaattccaacctttttcagctgtggttttaaagatcaggtaatgttatcttgggacggccatgacatgaggaaagtttttgagtagaagcaatgaagcttgtgagaaaagacacaaaggaagaagaagaaaaaaacatggtaacagcaacaacaagacatggtttcattaacttctcaagcttcaatatctttctcaagaaaaataagagtatattagtatctacccaaattgtaaaaagatgtgacaatgcctattaactgttaagaagacaagtcaaagaaaaaaacttattcattaaatgaaaaatgatacatttttgggcttttaaatgagaagaattactggaagtcaaacaattgaataact

SEQ ID NO: 49633 - DNA, 485 bp, Arabidopsis thaliana columbia
ggttcaatgagcagtacacatgggaggtttatgagccagcaactgtaataacaatcggtgttttcgataacaatcagatcaatagtggtaatggtaacaaaggagatgggaaaattgggaaaatcagagttagaatctcgactctcgaagccggaaggatctacagtcactcgtatccgcttcttgttcttcgaccttcaggtttaaagaaaatgggggagttgcatttagcgattaggttttcctgctcatcgatgtttcagatgctaatgcagtactggaaaccgcttcttcccaagatgcattacgcaagaccgttgaaagtagtgcagcaggagattcttaggcagcatgcggttaacttagtggcagctcggttaagtagagccgagccgccacttagaaaagaagtagttgaatacatttcggattcaaattcgcatttatggagcatgaggaagagccgtcaaatctcttcagattga

SEQ ID NO: 49634 - DNA, 501 bp, Arabidopsis thaliana columbia
acggccgccaaaggctatttggtttaaaggaaggattctcaagcatgcttttattgcttgggttaataagagacacatgctccatactaaagacaggctgaacagctggatacttagtgttccatccctatgccttctccggcaagtatagtgactaattgttgaccacagaaaaatttatacctacaaattaggcccttaggaatacttttaccaaattattatatgttcaatcttagaaattagtagtactaattagttaaacgtctcgacggaaacagtgttaatgaaatgattattcatcgaccattttgggcacctgatcttaggattggactacagcgcgtggcaacgagacgtgacataggcgcgtgagaacgaggcttgatgataccatctgtgagtgcgagaaagacaaaattaccctcgagagtaagagagagagcacaaccaccaaccctctcatcgcctctatctcctctgctaccttaagctgagaga

SEQ ID NO: 49635 - DNA, 492 bp, Arabidopsis thaliana columbia
tttattgaagtggcacggctatgtaacagagttatgctttgggtttttaaagatatatgtagaaagttaaatatagtaaccataacatatagcctaattattttatgattaacaatttcaaagattttgtaaatgttattaaaagatattaaagactcaaagtcaataagtgatttaatgtatcttgttctactactctcatttattccaaaaatgcatacatttctaaacttgtaaaaatctatatgaacgttattacttcacaaatatactattactagtattaagcccgtactatgtacgaggacaaaactttagccaaatttataaataaaccaacaatatttagaaatctttagaaaaattacaatcccaagtcttttggttactggatttaatcgcaggtcaagtcttacaaagagttttggctcaatgacaaaagataggtaagtaaaacttacaggttcattgtcaccacctgctatttgattt

SEQ ID NO: 49636 - DNA, 615 bp, Arabidopsis thaliana
taacggccgccagtgtggtcgtgtccgattcaacgcccaataatctctaaaatacaaaagaagaagtagtcttaaaattctagaaacagaagtcgcgacgaaaatctcagtatttaaaacaaacgtgcctaaacaaatagagataatcattcagatataatgcaaaaagacaaaagagagttgaattaaatcacgtggaaaacaaggaacacgacaaagcagaacagtctcactattcccgcgttaccactcaatacaatccgccacgtgtcccatcttcacgcgccagtcagcgttgatcttcttcctcacttgccacttccacttcttcatatataaatcccacacagccgcaaattcgaaatcaaccagatataacagaattaacctacacaactgaaactcgagttaagaaccggaaacagaatccaattcaaccaaaccgaatcgaaccgaaccggagtttttatccaatggtgaagcaagcgatgaaggaagaggagaagaagagaaacacggcgatgcagtcaaagtacaaaggagtgaggaagaggaaatggggaaaatgggtatcggagataagacttccacacagcagagaacgaatttggttag

SEQ ID NO: 49637 - DNA, 735 bp, Arabidopsis thaliana
actctagaggatttttcaaatatattacttgcactctttttatgcttcctctatgttacctgatttcttcgtgtggaaaatgggttactgttacgatctgcaattgccttagagacagatacgcgatgaggcgataatcgactatcatgacaacgagtgcggctacttcagttagtccgttgtctattctcatcccgttgtggacacagcgaagtcctgatattgtactttaagaagaagcttgtaggtgtggtaattgtaagatagataacgtatccacgatatgaaaacctgcactttctgtgtagacacagaaaaggaaatcagtaaaacagggaaatcaagaaacaggggaagttaaaaacagaggaaatcaagaaacagaggacttgccttgacgaagaatcctccggcgagcatgaatgtcatgacagttactgaagccaaagtcgtagccttctttaaatccattaaaatggcaccaattgcaagtccgagtccctagcaaaaagaatcaaaatcagcattttgattatactttttctcgttgattagggtttttaataattttaatctgaatatacctgagctgcgatgatgcaaaggaaaactgtgagcatgctcaagaagaagggatatgggctgatccgaagacctgtcatgaaatagacgacaagaaggaagagagaaggtagaataaagtcgagagggagatcactcgtggttcgagctagg

SEQ ID NO: 49638 - DNA, 426 bp, Arabidopsis thaliana columbia
cgtttgtggcttaaagaaattcccatattcatatttgagaagctttatttgaccgcctagctttgagatgttggcctggtttttacgtatgttattgcagttgcagttaaaagagactacagaacgtatcttagcagttgatcgtgcagcagctatgattgaggagatgatgaaacagaaatcaatttcacagatcggatcagttggtttacagacggtcaaggtatatactgcgtgacacttcttttttgtagttatgaaattggaacagtaagaaattaaaccatatttccagatgctgagcacatgcgtatatttgggtttcgaagctgacccatcatctaatgttgctgctcgtattcgtgggcctaatgtgagtcttccttcaatatctccccccttgcttctttctaatttacaccaaaa

SEQ ID NO: 49639 - DNA, 554 bp, Arabidopsis thaliana columbia
taaaacagtctggtttggtaaattcattttccccatttcctcttcctcactcctttgtactttgactgcatcgaagaagacgacccttccatcacgattaaaccaaacaaagacgcgattgaaccaacccggtatgatttctctgttttccggtttaattttgttctgttaagttttttcagtgagctctgttcttcactcttagtgtcaattcgtatagatatacgtgtatatcgtgcttcaaacctttttcgataccggtgagatttgccaggtttggcaagacgaacgacagtggaagtggatgttccatcggaagcatttgccgggaaaaaggttgttccttttgttttctaaagccttcgtgtcctctgagtctaatgatgggttatgttatgatttttaatttcccttaagtttaactaaaaattagtatttactttgaagaaaataaaaagtaaaaaaaatcgctttgataaaaaaatttagcttctccgtgcagcgagtgtagtcggcggctgacgttttctgtaccctaacacttttgaagagac

SEQ ID NO: 49640 - DNA, 586 bp, Arabidopsis thaliana columbia
gggaagatttagtaaaggcgagaaagaaaatgaaagatgcagatgtgaaaaaggaagctggttatagttgggtcaccatgaaggatggagtccatatgtttgttgctggggataagtcacacccagacgctgatgtgatctacaagaagctcaaggagctcaacagaaagatgagagacgcaggttatgtgccacagacaggatttgccttgtatgatctagagcaagagaacaaggaagagattctgagctatcacagcgagaagctcgctgtagcttttgttctcgcagcccagaggagctctacgctgccaatcagaataatgaagaacctcagagtttgcggtgattgccactctgccttcaagtatatatcaaagatcgaagggagacagataattctaagggattcaaacaggtttcatcattttcaagacggtgcatgttcttgtagtgatttctggtgataccatgagtctcaaaggtatgaagaccatcaacctccaatcgagattccttttaaatctcttattcatgtatgctctgtttcttcagatgattttacttggattcagcattcattgac

SEQ ID NO: 49641 - DNA, 609 bp, Arabidopsis thaliana columbia
tgatggtcattgaagaagggtggtcaaaatttagcccacgtgacaagggggagagaagaggaagaagagtacagtcatcactgcaaaaatctccgatcacgaggctcatatttttatttttatttgttctctttcaatataatgctataaaacctctgtctctttccgtatctctgccctaaaaccctgaatctcacgcgctcctgctcagttgcgcgtggcctcgtcctttacttctccacatcgcaatcacacgttcgatatctgctcagcctcatgtggttaatgatgatccatgatgatgtaagtaaaatgacttagatttggttattagatttcttcaaaacttgcagctagctagagtctactctactcttgtcgtcaacgaatactagtcttcgtccctatacagaattattttatttttttgggattacgtatgttaaatgctttaactactgttactaataaaaccctatttttattgaaaacatggactctcgattggttgaaaaagagcttacgctaggggatataatgcattggccgatctaatttttttttttgcgaacactattttttgaaaattttgtaacaaacaaataaaag

SEQ ID NO: 49642 - DNA, 606 bp, Arabidopsis thaliana columbia
tttctctactaatcaatttcaacgtcgtttttgagtgaacaagcctttgttcatgtgtattgttgatagatttttcaatgaaatttcattctttcaacagagaagagctgcaaccggaagttagaattctctacactatagaagactacaacatcaattcgtatactgacatatggttgtgcggctgatgcggttgacgaatacctccatattggtgaaaccctcactatcatgcatccataattttgttgaagcgatagtttttttttccagagatgagtacctacgaaaaccgactgctcaagatattgattggttacacatgattggagagattcgaggttttccagggatgatggaaagcatcgactgtatgcattgagagtggaataattgcccaaccgcttagaaaggacaatgtgcacgtggatctggaaaaccaatgatcgttttagaggctgtagcttctcaagatctttggatgtggcaccatttcttggacctctaagtaccttaaacgagtcaatattcttgattgtactcctgtttttgatgatatcttcgaggtcgagctccactgtgaattatgtagtcaaggggacgagt

SEQ ID NO: 49643 - DNA, 553 bp, Arabidopsis thaliana columbia
cagatggtttgccatcaccttgacaagaacatcccagaagatgtagcttttgctgaatcaagaataagagctgaaacaatagctgcagaggatatattgcatgatatgggagcaatcagcattatctcctccgactcacaagcaatgggtcgcattggagaggttcatagtatttgaattcttgaattctatatcctttctgtagagatgcttactttgtggcatgttctcttttgacaggtaataagcagaacttggcagacagctgacaagatgaaggctcagaggggagccattgatcctaacatggctgatgatgataactcaaggatcaagagatacattgcaaagtacactataaacccagctatagccaatgggtttgcagacttaattggctcggttgaggtatgctaatcttctccacacgtctcatatcttacttatacagctttattttcctctgtaactacttaacgtcagtgcttttgtttacttaattggaaactgcactgtgatgcaggtgaagaagctggctgatcttgttatatgg

SEQ ID NO: 49644 - DNA, 520 bp, Arabidopsis thaliana
cttttttttatttgcctcctaaaagcaatcaagcttggtctgctccagatatgccacttgatacctctggtcttcctcctcctgcattttatgatattactgcctttagtaccgataattctcccatccatagtccacaacctcggagtccacggaaacagatcagaagcccacaacctagcagaccatcttcaccgttgcattcggttgatagctcagctccaccgcgagatagtgtttcctcacctttgcatccgaggttgtctactgatgttacgaatgggcgacgtgattgctgcaatgttcatcctttgcctctccctcctggagctacttgttcctcttcatcagctgcttctgttccgtccccgcaggctcctctcaaactggattcattcccaatgaattcccagtggaagaaagggaagctaataggtcgtggtacttttggaagtgtttacgttgcaagcaacaggtagtcttttctctctatggtatgatcttcctacagtttttgagt

SEQ ID NO: 49645 - DNA, 604 bp, Arabidopsis thaliana columbia
taaaggtttttgacaatctcattgcttcaggtcccaggttacaatatcatgtgcaatggtgatgtgccacaggttttacatgcgccaatctcatgcaaaaaatgactggcaggtaagaatgctttagtattcatatggttcatcaattgcgttcattggagctgacatgtaaatattaatgattgaatagtctgcaacagatatattgattcttcttacaaaatttgggttatgagcaatataatgttgatgaaaacaagtcaaaagtggttatttaatagttattcagtcttcctggttaattagaagtgtatatgattgctgctaaatatttccacttcggtttctcactcggtgattttgcagacaatagcgacttccagtctgttcctcgcttgcaaagctgaagatgagccatgtcaactgtccagtgtcgttgtagcgtcttatgaaataatttatgagtgggatcctctgcctcaattagaatccacaaactgtaagtgtatcatacatctatgtattggtaaatcgcactgtgcattttgctaatttattacatgttgctctcctgtagggatataaaaagtgacgagagattagt

SEQ ID NO: 49646 - DNA, 581 bp, Arabidopsis thaliana
tacttgctttcttcgtggttagggatgatggtaatctattctaatccaccacttcataacgactgcaaaatgtttaaattgtaagatggaaataatacagcttgatacattgttaatttgcagccaataacacttgcgttagtgtatgttggaacaactctaaaagacctttctgatgtaactcacaagtggagcgagttctcgccaggtcgctgggtaagatctacacaaattttaattacattctcagcttcttgtttcaatctctattctgacctgttttccgcaatctgcaggcgttcttgatttcgagccttgtaatatccggttagttcggcataactaatgttactagttccttcgattgcggcagaatcactaatgttacaagttccttcttctatctgtttctttgcagtgatattaatggtgtgtgttacaaaggtggcgaaggacgctctaagaaaagctttagcagagcacggaggagacatgaacgaagcggttgcagccttgccggagctgaccgttactgatgatgcttcgacggatttaaatgagcctctcttgataaagataga

SEQ ID NO: 49647 - DNA, 992 bp, Arabidopsis thaliana
  unsure (1)..(992): unsure at all n locations
caacattaagatctcgctctgtgacgccttgatcgtgaggagtgggactaaggttggccgtgaggtgttcgaatcgtctcacggacggctcaaggttgttggtcgcgctggtgttgggatcgacaacgtggatctgagtgcagcgacggagtttgggtgtttggttgtcaacgctccgacggcgaacacganntcgtgccgctgagcacggaatcgctcttatggccgccatggctaggaacgtagctcaagctgatgcgtctgttaaggctggttagttcctttttgattcattgcctcaatttcatactttccatatgttgcgaaatatttattgattatgttctttctatacctgtgattgatggcttgttgtgtttattaatttgtatcatgagctttccttttcctgtactgttgttgacgatggtgaaatttaggatcgttacatttgctgattcttttgaaattgagttttgatcattcttgtctgttatctagctgacttgtggatcttggttttaataataccattgtaatgcaggagagtggaagaggaacaagtatgtaggtgtttcacttgtgggaaagacccttgcagtgttgggattcgggaaagttgggacggaagttgctcgtcgtgctaagggtcttggtatgcgtgtcattgctcatgatccctatgccccagcagaccgtgcacacgccattggtgttgacttagtgagctttgatgaagcccttgccaccgcggatttcatttctcttcatatgcctcttacgccaacaacatcgaagatactaaacgacgaaacctttgccaaaatgaagaagggagttcgaattgttaatgttgctcgtggaggtgtcatagacgaagatgcgttagtgagagctctggatgctggtattgttgcgcaggctgcacttgatgttttcaccaaagagcctccggctaaagatagcaagctcgtgcagcacgagagggtcac

SEQ ID NO: 49648 - DNA, 899 bp, Arabidopsis thaliana columbia
taagcctttttccaaaaaaataagaaagaaaaaaacgttgaacaacgtggtctttttcgttgagagacacgcattaaacaaacaaacgtgtcctcaccttgtcattgataatgcgtgcttcataaccacgtggtctcttaccaagactcttgcttccttccttcgcagcatcttccttctccttaccctatataataacaaagttcgtattagacctaactcatatgtaaaataaataaacggaaaaaaaaactcatatatatatctaagaaaatcaactacataattaccttttccgttgctttttgagtagatttctcttgatccgtattaacgttcttatatccagcttcggctgcagcatttgccggttgagcctccttacctccaaccttccatggctcagccggcacatcaatggccatcggtcgaacgtccttacctccatattcaagagccttccatggctcagccggctcatcaatggccatcggacgaacctccttacctccatattcaagaactttccatggctcaaccggctcatcaatggccatcggtgtagacatggtcattatcgggcttctaaccacaggatatggattatctttaggttctgagtcagcaaaggattggaaaagtgaggaccagaactctacggtatctcgatcgttgtccatatttatgaaaggtaactagttgaagagtgatatggagagtttgtgccaattgcaagaggtatttataggagaggaaacaagagcgggaaagagggttatcgactcaaacttctgtcggaacttatcatattactataggatttctattttgtcccttgaggatatatattatatatccatcttcttgtttttatgtaaatttcttaattcaaaagattc

SEQ ID NO: 49649 - DNA, 829 bp, Arabidopsis thaliana
ccgaggagaagcggttgattcaattgaatgaccttgatgaaatccgccttgaagcttatgagaacgccaaaatttacaaagagaggactaaggcatttcacgacaagaagatcgttccaagagactttaaagtaggtgatcaagtgttgttgttcaattctcgtttgagattatttccgggaaagctcaaatctcgttggtcgggtccattcaagatcaaagaagtgagaccctatggagccttggtattgtggaacaaaacgggaggagaatttgttgtgaatgctcaacgcttgaagccttacttcgcgaatcaacacattggggagggaccaaagttctctcttggagcctcaatcgcctaatttgtgtggaaacgtcaagcttagtgactttaaacaagcgcacttgggaggcaatcccatggtatccttgtacatattttgattctatttatgtgcttttggtttgattaagtttcagggaagtatttggaaaatttcatatcaagacgggcaagcaaaaccatttctgggcaagcgaatcgaccgcatggtcgattggacggtcgactcatccatgtccgcaaatccgtcagatttctaatcgagcactcaatagagcagtcaatagacgagttggtcgattggacggtctactgattcatgtccgcaaatccgtaaattttcgaatcgaccaatcaattgatcgattggttttgaaagcccaggtaagtcatctcttgacttcgtcggttcactagaaattttccggtttagtcccttaaccaaccaaaaccgaaaaaaaaaataataataataataataat

SEQ ID NO: 49650 - DNA, 871 bp, Arabidopsis thaliana
atctcacatgtaggattagcaagcttcaaggtacggaaacagatatcgtaaagagcttcgttatccaaaaccatacattcatcagcattctcaacgagctggtgaacggaaagagtagcattgtatggctcaacaactgtatcagagaccttaggagatgggaagaccgaaaaggtcatcatcatacgatctggatattcctctctaatcttagaaataagaagtgttcccattccagaaccagttcctcctcccaaagaatgacaaacttgaaaacctgctccacaaatgaatcatcaatcagagaatgaaatcaaacgctaaacaaagcatctatgaaggagtttctaatagcagatctgaattcgaatgcatacaggaacaggaaacgctaacaaatcaaaacacaaacgagattcagaaaacgaaaacctagaaaatgaaagcgtatctctctcaccttgaagacaatcacagttctcagcttccttcctcacaacatcaagcacagaatcaatcaactcagctccctccgtgtaatgacctttcgcccagttattcccagcaccagactgaccaaaaacgaagttatcaggccggaaaatctgaccaaacggcccagatctgagagaatccatagttccaggctccagatccataagaacagcacgaggaacgtatttgcctccgctagcttcgttaaaatagacattgatcctttcaagctgtagatctgtatcgccacatgactgaccggtttgatcaataccgtgctcgccgcaaataacttccagaacttagctccgatctggtttcgcactgacctcttgaatatgaagaattctctcattttcatcggatgttttttttt

SEQ ID NO: 49651 - DNA, 579 bp, Arabidopsis thaliana
tgcgtccctcaggtactatgcatgggactatcgcctcctgaagagatttgcccgtcattactcgaccggtgagacaatacccgagaagttggttaattcgttacaaggtgcgaggaacatgtttgcagcaacggaaatgcaacgccaggtctgattaattgattcacctctcaaatagattcaatgcagtaaaaacaactgtgttagagagatcaacttgaacttcggtttctatttggtttttggtaggtcttttatgcgctgatcgaccaaatgttgttcggggaacaaccagagacagcaagagatgtgagtcacctcgtggctgaactgaaacggcagcacactagctggaaccatgttgaaggaacacattggtatatccgattcagtcacctacttaactatggagcaggtatatatcagtctacatatataaatgcatacaagcgtttctctgcagatgtatcttgaactctgttgtgtatgtgcagggtactatagctacttatacgctaaatgctttgcatcgacgatatggcaatcaatatgtgaagaagatccgctttcgttgaacac

SEQ ID NO: 49652 - DNA, 592 bp, Arabidopsis thaliana
ttgaagaagacgtaaactatatatagctgattattacctattcaacaaatccctctttttaaacctattcaaagccaaggacaagaaaaaaaaaaaagagtcgcccattttcttctcattttttttttgctcttgacgaagaaaccaaaaaaaaaaaaaatgagagagatccttcatatccaaggcggtcaatgtggaaaccagatcggagcaaagttctgggaagtgatctgcgacgaacacggcattgatcacaccggtcaatacgtcggcgattctccgttacagcttgaacgtatcgatgtctatttcaacgaagctagcggtggaaagtacgttcctcgcgctgttcttatggatctggagcctggtaccatggattctctcagatctggtccgttcggtcagattttccgtcctgataacttcgtctttggtcaatctggtgccggaaataactgggcgaaaggtcattacaccgaaggcgatgagttgattgattctgttctcgatgttgtgaggaaggaagctgagaacagcgattgtcttcaaggttaggaacaatttttttgaatctggatctgagtttttg

SEQ ID NO: 49653 - DNA, 549 bp, Arabidopsis thaliana
catcgatgagcattttttttaagaatagttattcacaattgaattgagaatatactttacctgaacaccggatacaagagatccggcgaggacaccagagagggtctcaactccaaagaagaaaccaacaatgagaggtgtgagcatgacaaggcaaccaggaggtatcatttccttgatggaagcatcggtggagatcttgacacatgtggcgtagtctggttttgcggttccttccataagtccagggatggtgttgaactgcctgcgaacttcttcaaccatcttaagagctgcacttcccacactcttcattgtcatggcagagaaccagtaaggaagcatggcaccaacaaggagcccaatgataactttaggggtcaaaacatctacggtgtggatccctgcacggctcacaaaggcaccaaagagagccaaggagactagggcagcagagccaatggcaaatccctgtacacaacaaaccagaataacatgtcaaaatacaacacaagcaaaggcaacctgaggaatggttcaagcaagcac

SEQ ID NO: 49654 - DNA, 482 bp, Arabidopsis thaliana columbia
gctctcccactcgctctcctcgttgtcttctattacgttcgatgagaggaagaagaaacatgaaaaggtttctctgaattttggagtgtttaagtgatgagcaaacaggttcaaggtttaaagttagtttagaagcaaatgacgttggcaataatgtcatagtcaagatggagtagactgaacagtccgtgtttggtgtcatatatttcagagtagcagagacattcacctccatgatgagatatgtttgacattacatagctgattcggttgaacatatgacctggagaagctcttgcacaaggatcaagtcaactttgggacctcgaacaactctccatggacgcaaatgtcttgaccatgactccaaacacagtcacttcataattaatatgttttgatctcttagttgagtcttaggaactaaaaagcatcctcttagtccttgtgtagtagcatcagaatgtgtgtacatggaagag

SEQ ID NO: 49655 - DNA, 738 bp, Arabidopsis thaliana
tctctcaactgacaactagtaaatcattttgatgatatgtaaactgtttaactataaaacaagaaatacaactacgtggacattttgtacaaccaataattagggtacaactgcatataaaaaaacggcgcacgtgtataaattacggcgcacacgtggaatcaccttattctccaaaaaaattaatttctctccaatttcaatttccccccaaatccattaaaatttcccaccaaaaccaaattccccccaaaaccaaacaaatatctcttctctctctcactcaaaattcattctctctcttcaaatcattctctctctccgtctcaaaatcattctctctctcgatctcaaaatcatttctccattctctctctctctcaaaattccttctctctcaatcagctatggatcgattgtgtgagagtgacccatggtatggtgagatgaagagcgcaaagaggataatgcaacaactagaagaagtggcaatgatggagggaattccgccaatttgtccttgtggtggacgcatccttgacataatctctgagaaagatggtgacaaaggaaaaagattctatgaatgcaccaattataaggtaaattgaagatatcatcaatattgttttagaataattcattaagcttgttagaattcatattttgtagaatgatgggttaccattcgaaaactttgggataaagctatggtagaagaggtgaataggctaagag

SEQ ID NO: 49656 - DNA, 423 bp, Arabidopsis thaliana columbia
ttaattaaagttattatattttaaataaagttgatttggtaaatgttgtactcaaaaactacaatgatacaaataatagcacttcaacatttacttttcaatgtttcatctttctttagttaataaactttactgaaagcatccacgctttgcaagacatataaacatatagttacaggtttaatctttaaaaagaattatgtatttataattacgaacatttgaaaattcaaatcagcaaacatggtgaatagaatatgtcttgatcatggaaatcacacattctaatacgtctgaccactcaagtctttgattttgtagccggtaacacactatggaagaaaataattagaatagtgtattttattttcttaaaacataaaccatacatgataatacaatccatataactctggagaaaga

SEQ ID NO: 49657 - DNA, 581 bp, Arabidopsis thaliana
gcttcgattctcttagctggagctgctggtgtaactataccactcattggcaggaaccgtcgtttccttcaaactgatggtaatctctttgtgactgctaaagcttttgcagctggtgtgattctcgccacgggttttgttcatatgttggcgggtggcacggaagctttgaagaacccgtgcttaccggatttcccttggtctaagtttcctttcccgggattctttgcgatgattgctgctttgatcactctgtttgtggatttcatggggactcagtactatgaacggaagcaagagagggaagctagtgagtctgttgaaccgtttggccgtgaacaatcaccgggtattgttgttcccatgattggagaaggaacgaatgatgggaaagtgtttggtgaagaagacagtggtgggattcacattgttggcattcatgctcatgctgctcatcatagacatagtcatcctcctggtcatgattcatgtgaaggacacagtaaaatcgacattggtcatgctcatgctcatgggcacgtgcatggacacggacatggacacgtacacgggggtttgga

SEQ ID NO: 49658 - DNA, 1658 bp, Arabidopsis thaliana
tcctccaacaccaaatattcttctattttgaggtgttagaccgtgtaagaaatcaaagacatcaatcagaataggtttgcaccatataaacaacttcagtttttaaatcacttaattgtaatacgataaaatagcacaatcattcaaaaacaaacaaatgctcaataattatacacaaggaacccaataaatgggcaaaagtatatgaacgttgtttaactagtgaaatatttgagctataatttttaatcacttctcaagaaaaccaatcaacaacaataccccttttttttttatgtcaaagcaatttcattgattaaatagagttgttacagggatgttggtgaagccaactaggaatgagttccagaattagaataaaagcaagatgaaatacaacaaaattttgccaaatcatgctctatcttattaccctccttcttgatgaatttatactggatgctatagaattttgctgcccaaaactgaatagttgttagtagattcgctaacgaacaatgggaagtagagttagtaactaggtttatcaaagtttgacaatctccttccatgatgacaggtatatagcctcaaatccaagtttgtcgaagtgttgccaataacgcctttgtttctgcctctagcggtgtgcttgtatggtctagtatcatcgagccccaatgttcaggtgtcccattgtggtttatgagaatccaacctcctgttgcctttaggtccttcacattaaaactaacatcgaaattgcattttatgtatggcatctgtggatttatccatgtagtattctttgttgcattctttcgcttatgttatcttcttgggacttgagtttgagtagcgttaaacaattctttcgtttcagcctgagcccttagcactgttattgatggactttctctaaaattgttaaacaccacgttgtttcgtgctttccagattttctaaagcaaccagaatggaataagtttctgagaatctgttatcgtgttattttggagaagtagtaggatttttgaaatgttgtcttcaatgttgtcagaaattaaggtgctcccatagatttgtgaatcagctagacgacaagccattgttgcaaaaggaaaaatgaaaagtgtgtaatttattgattcattctctcttcgacatcgtgggcatccagggtctatgcgcattcccctcgtggttaggcgttccattgttggtatacctctagacagtattcgccatagaaaatgttttagctttggcatgattggcaagttccagattttgatttttagttccactgaaccatggggtttatccattggtaagaatgctgtctaacgggtcatgagttagtaaccaatagcccgagcggactgtatagttaccgtgaaaaattaactccaaataagatgatccggtttacttgtttttgagagatagttgcgttgaatataatcatgatcactttgatccacatattttatcaatttagcatcatcccaaaatcggcttgaccctctatgctggaataacatgtcaagtgataactctttgtatttttctccgtttcaaagggcgaggaggatgagaatcacgacattgacttttaataccagtcaaacataaatatgagccgagtgaatattatg

SEQ ID NO: 49659 - DNA, 550 bp, Arabidopsis thaliana columbia
tcaaagatgaaaaattctaaatatattatcctaacagggtttttgatctactaattcatctaaatccctaattgagaatccctaaacccatcaatagaactactcagacatgattatcaaggaacaaaacatgattaacgtagaaatcaatgtaagaaacaagatgagtatagagtttagaaagatcttctctagaagaagctccacagggttttgttcccaaaaatagaatagataataagtgttaggtctaaacaatgattttaaaaatccatatataagttcataaaacgtgcagggacttctttgaaaataaagagaagttctggggcaaatttggaaatcttcaaaacttcaataagttgcgtaattgaattcctgtcagatattggtgtcgctcgacactaggggtggtgtcgatcgacacctacgtgaaatttcgtctccagattgcttatgtagtttaagttgtctgttttgctatagaatgctccataatctccaattgcacccaacattgtatagatctgaaaaagactagaaacataaa

SEQ ID NO: 49660 - DNA, 532 bp, Arabidopsis thaliana columbia
gacggatttggcgagacgggtttgataggacgtcacttaataacaattgtaaactataaaataaaaataaatagatttaatttgtaaacttttatatatactaatttaaaacataagttgtccccgcagtataccgcgggttaaaatctagttgtacatatttatccttcatttatcatggttcatacacttaaatggattctgtaaatcacggctttttctacgtttaacttgtattaggtgagatcctttggatcttaattcgtcatataaagattattcatttagagatgtacatttataagatttaagaacataatatgtaaataagtatagtgttcaaatgtaaatatgtgtatatatttttgctcagtgtaaaatctaatttttaaatgtgattattgttgaatagcagaagactacaaatatttttagaaaagtcatgtttctctataaaatcgttgttttcttctttgcaacgttccattttaatttactttctccaaaaaggtaaggattaaaaattagattc

SEQ ID NO: 49661 - DNA, 461 bp, Arabidopsis thaliana columbia
tagaggatacgatccccctgactagtttaaacgcagcgggtgcgattgcggttgcaggagtttgcggaaacgggcggtacgggttttaagcgttatcaaacgttttaaacgactggttgagcgtttgataatggatgcgtttgcgggagttttatgactggtaaaccagcgggtgcaatattaattaaataaaaaataaccaaaataaatataatatattactattaaaagaaaaaatacaatatattataatgataaaccgataatattagaaaaattaaacatgtttaataattaaaaccataaataaaatattaaattcaaaaataaataaatttggtaagaaaaagcttaatactttatgcatttggtacatcaccaaaaattgcatcaagtagtgtgataaactataaataacgttgaattcgcgggttttccggattgcctctatacatatgata

SEQ ID NO: 49662 - DNA, 532 bp, Arabidopsis thaliana columbia
tgagaaaatatcttaaatttctaggttcaaatcttcaattttgagctctatgcagctctaaaaacataccttttcttattatctcgacaaaactcgccggaagagaagatatgccaacaatgactactgaaatcgaatttcggcgagtaagagcgacgagctcaaacttcaaaggagaaagaggagaggagagacgaaatttgggtttccgaggtaaatttctaatatgcgaaatgtggattttaaaagtcaactagttttaaaatgaatattagagaaagaagaaggggtaaattcgtttatacacattttattaaaagagaatgagacatgaaagaaaaaaagatttaagagatttgctgtttgcatttcagaattatgagatcgtttctcaaagggatttaaccggtttgctgtaaacaaaaggatacgagagacaatctcgggtgacttaatcgggtcgaattaacttttgttaaccggaaactacccgaaccgaaatcgcttagccactgatttgttgacattgtga

SEQ ID NO: 49663 - DNA, 616 bp, Arabidopsis thaliana columbia
  unsure (1)..(616): unsure at all n locations
tagtaacggtctaacagataataggatcaaataaaacgaattcacaaacgtctgtctattgcttgcttagattagattaacagattaagagtaccttccatagcgtaacagaataaacttgtctgccaatgatatcggtttagtcgaaaaattgtcttccaaatcctataacacaaacagataaactcatcatagatatgtcagcaatagatataggaaaagaaaattataactatatgcagatcttttttataaaaaaaacaagtctaaatttgaagtatatggttttgtcaatcaaatgagtttgttacaaatgaattacgtttcctaaacaagacattcccttgttttttactgaaatacgaaagaaaactaaacaatgaaacaatagagaagagaacaaaagatagaatttgaaaattatgaatcaagcagccaaatatacaataactgtatcgaatttcgacaatacaaattttacatgaaaataaattcaaatcgatataagaacatggagaaatttgggggaaatactggtggagagatccagagagagnaaccagtggtgttggacagtgacggagaaattggagatctttagggtttgtgagagaat

SEQ ID NO: 49664 - DNA, 1205 bp, Arabidopsis thaliana
gatccccattgctaatttcctttattttgttgagtaagattgaaagtgaaattacacgggtatggatttatttgttatttcttcaactgacagggctagtgtagaatatcagcgaggggtaactagttttgtacatgcatcatcaatgagactgggtaatcctagtgccatgttgtgtccctgcatagactgtcgcaatttgtgccatcaaccggtagatctagttttggatcatctagtgattaggggtacggactagaaatacaagaggaatgcttgttggagtttacttggggatgtaaggcctgataagccatctgagaatctgaactctgtttttgaagtttatgatttgattagaacagctttctttgatagtgaaagcaatgcacagacccatagccacagtgaagattcaagagatgagattgatagtaaagaagaatatgagtttaggaaaaactagaagatgctgaaactccactatattctggctgtctcaacttcaccaaggtgtctgcgcttatggggctttacagaattaaagttaagagtgggatgtcggagaattattttgatcagttattgacaatagtggcttccatgcttccaacggataatgttctcccgaggtcaacaaatgagatgaagagtatcttgaagatgtttggttttggatatgatatgattcatgcttgtaagaatgactacattctttaccgaaaggaatacaaggacatggaaagctgtccacggtgtagtgtttcaagatgggaaagggataaacatagtggtgaggaaaagaaagggatcccagctaaagtacttagatacttttcaatcaaagacagatttaggaggatatttagatccaaaaggatagctgaagaggtgcgttggcattcagacaatgctagttcagatggaagaatgcgtcatccggttgactcaataacttgggccactgtgaataacaaatggccagagttctcctctgatccaagaaacctccgcctcggactttcaacatatggaatgaagttattctcgatcgagaataccaagtatagcacatcgccagttctattggtcaactacaacatggagccaacaaagtgtatgaagtcagagaatataatgttgactttattgattccagggccaactgcaccaagcaacaatattgacgtctatctagcaccttt

SEQ ID NO: 49665 - DNA, 481 bp, Arabidopsis thaliana columbia
gaaaatttttagaatgaatatgaaagaaatttcttttttgttgctagaaatgaagagagaaaaccagaaggcaaatatttggatgaatatacaacaaacaagaatgaggcatatatataaagatttgaacaagggagaaaacgaaaccgataattaaacaacaacttggtgggatattgataagacaccatcataaattcgctacgataaaactgtcgcataacaagttgctttggaatcaacttgctacaattatagtgtcgcaacagttgtgtcgcacaatgagtggcctttggtatgaggcagggtagtcataagttgtcataattgctacgaaacataatgtgagtctccactttgcttctagttgctacaaaccgaattgttgcaaaaattaaacaatattagtaatcttattttgtcacaaacttttgtgacgaaacctgttttgtgaaaatttacaacaaaatttttgatacta

SEQ ID NO: 49666 - DNA, 678 bp, Arabidopsis thaliana columbia
tgtaattatgagtctcacctcctcactacataaacgaacatatccaaaccttgttcatctctaaatattaatgaatatattaataagcatttgaaaaaaatctcggtatgcgaattctggtaaaaatagtctcaacacaaattgaaatggtgagaaaataatgatatgattgcgtttataatttattcaaaaacaaattataagtatcagtaggagaaagactcaccactagccatagacatatatttaaaatacatgtccaatcatttatgcatccaaggaaatgcaagtggaaggtgtgtgctgaagttccaatcatatcattaacatatcagttctttggttattgacacatattaaaaacttgttcatctgtggagaagaaaagagttaggaacatcatagaaaaatttattttaaagaacgtaaagcaaaactggtgaaacggcgcgaggttttatagtgtaaatggcgggtagtttcaaagtgaccaaaaatgtgattattaactgtaacgccatacgttatgtttctgaaactaattcaagtgaaagacaatctttctaaatatatactatacttacacacggcataaataaaggtcatgacaaactttcgaaaaataagaacatatatataaataatacataaacaaagattatacatcgaggagtgcga

SEQ ID NO: 49667 - DNA, 610 bp, Arabidopsis thaliana
caaagataccccgtatctaggttggatgaacggtacggctggggaagacccggcaaataagaagtggataacagatgtggatcacttgtatcttgtctgccaaaccggagtatatcattgggtgacccttcacgtgaacttgcctaggtctcacatcgattgctatgattgcatcgtcggagagcatactccgattagcgatggaaacatcgtggaagcttgtaggccgttcatgaggatgattccacagatgatgagcaaaattcttcctcccaaagttcgtatcccgcaatacgaccaattttcattctgacggaggcacaagacaaaggtcacgcaaaatattatcaccggggcctgcggcgtttacacgttaaagattcttaaatgtttattgcttggtgtttgttttgatggcattactgattcaaatattcagggtctacggattagaatggcagcagagatcttcaatgaagcacctgcaaggatggtcattcggttttttgagcagtgatttgctttttcgaacaatatgtctgtgtcttttcggatttttagcatgtgattgtactaaataatgacactttaggattgatatgtctgtatg

SEQ ID NO: 49668 - DNA, 1632 bp, Arabidopsis thaliana
gttcatcagggttatgcatattgtctaattttctttcaaagtggcatgtactactaatgacttgataccttcatagccttattggtcatgtatttttgtttaaattttttcaaactctaccgattgcagcgtactgatggtggtgtaccgaaatcggtgtacagatttcgctgtacagtttaatttttactattacttagtgagcaattttaaagagtaggcatcatgtcattaatatgttttggtttgaggatgtaattattctcaactgtaacttttccaaccactactttattgtggcttttatattcaattaacctgcaataacattgtagaagaagaaaatttgtctttgtttcctctcaaaggctatccacaaaaaaatggaaatagaaatgcccgatatccctgacgatctgttggctaaaattgtcaagctcgtggctgatgatcgttggtggttgctaggtcctatcttgaaggctggccgaaggggaagagatatggtgtacaaagatgacgttttaaaggatgcttgcatctactctctctgttctgatccaagcgatttgtactatttccgtcctttctttgagagatgcctcaaagctggcaacaaaactgccatctactatgaagggctaagggtggtggctgaaggttgtgacctcaatgggggtcttgaacttctggctcagctggtcccagaggatggcgcttcaacaatagcatgtggcattttctccatgtgtcttgggaatgaggctatggcggtccactatctagagcagtttgggattttccacgctcccttaggtacccaaagggttaggctatggggagaggagttggtcagagatttacggccatatcggaggataagccacgcttcttaccggaaggcgttcatttatccactttgcaaagggatcccgtcgtctgattgtgccatggattgtgctcttgcttcaagcggttatgagaacttttgcaacgattgttacttatggtggttgtcaggaaaggtctgtcaaatggtctgaaggttttctccttgtttttccgtattgatcaatgtttagattatattatgactatgcggatgtaatttgtttttgctttttgctgtataattatagtccttcagctattatctcactatgttgtttaattattgtattaagttgttttcgcctttctggatgtataatatttgtatttttgtattatttatatatatgttcttatttttcgaaagtttgtcatgaccttcatctatgtcgtctgtatgtatagtatatatttcactagttttgctttacgttctctaaaataaattgttctctgatgttcctaactctgttcttctccacagatgaacaagtttttaatatgtgtcaataaccaaagaactgatatgttgatgatatgattggaacttcaacacacaccttccacttgcatttccttggatgcataaatgattggacatgtatttaaaatatatgtctatagctagtggtgcgtctttctcctactgacatttataatttgtttttgaataaattataagctcaatcatttcattattttctcaccatttcattttgtgttgagacttggatatgtttc

SEQ ID NO: 49669 - DNA, 604 bp, Arabidopsis thaliana columbia
catgttgccggatggcttgaagcaataacagaaattgtataattataatttgaacaactatttatgaaaaacgtaggtattatagatcgttagcttggatcatcctagtagaaaacaatattacaaaaagaaactatttacaaaaagcctatcgatatatatataaagattaagagtaatgaatcataagcagaaacaaaatgctaaaacatttactcttttgtccatgtatttctcagctcggctcgccatatataacaataaaatgaagaaacattatcctaatatctacactatcttttgaggaagcaccaaaactctcttcctctttaaaaaatgagtgaaccccaaaaattcatcaaaacagccggcaacctcttcaacatcctggattcgagcaacattgcggggtgccgtgcgatctcatcgtgtgtaggggcctcaagggtttaaaaatttgacattcaaaacccaaaaaattaaatgccaaacccatgcctgagattctgatgtaccgtaaaattctttttctttgaacttgtgtaggtgttgccgttacttaaattcattctcatttgtcttcaatgaatattttgtttataaa

SEQ ID NO: 49670 - DNA, 534 bp, Arabidopsis thaliana
ttcgatcttgcagcttagaactttcaacttggaaattgatttcatctagtttatctggtgctttagctctgagtccccgctttcaaacctcacctctagcttgttcttgattgtttgcttgagggcaagcaaagactaagtttcggggagttgataagtgtgtattttgcatattttgagcatccatttgtcatcactttagcatcatatcatcactgttttataccatttctcatcatttgtcatcactttacatgtttaggataggtttgcatacatgttgcatatttgtattgatttcaggtgatttagagctgttgacgagctaactagaagaagcggacctgatcatgacaaaccactcgaccccaggtcgagtagatggcatcaccacttcacctcaccactcgaccacgaggtcgagcgtcctcatctccatcacctgaccattactcgatcacatcactcgaccctgaggtcgagtgtcttcacaccattacctgatcatcactcgaccatatcactctacctgga

SEQ ID NO: 49671 - DNA, 2478 bp, Arabidopsis thaliana
cctccatgtattctgatttctgtaattctccagtaataaaatctgtctctttgcccgtggatgtagccatcagaaagtgttggtgaaccacgttaaatctgtgtcgtcgtgttctttacgtttttgttatcttgctcacatctgttataacataaaaggtgtatcttttccacacacaacacacgcttgtttccctttcactttacacccagctaatgtccccaaagctggataatcagtgatactccacagcaacattgccttcagtgtaaaattctcttttagaaatgagtcataaacgataataccttcattccacagatcattaagatcatctatcaaaggtgctagatagacgtcaatattgttgcttggtgcagttggccccagaatcaataacgtcaacattatattctctgacttcatacactttgttggctccatgttgtagttgaccaatagaactggtgatgtgctatacttgatattctggatcaagaatggattcattccatttgttgaaagtccgaggcgcaggtttcttggatcagaggagaactctggccatttgttattcacagtggcccaagttattgagtcaaccgaatgacgcattcttccatccgaactagcattgtctgaatgccaacgcacctcttcagctatccttttggatctaaacatccgcctaaatctgtctttgattggaaagtatctaagtactttagctgggatccctttcttttcctcactactatgtttatccctttcccatcttgaaacactacaccgtggacagctttccatgtccttgtattccttccggtaaagaatgtagtcattcttacaagcatgaatcatatcatatccaaaaccaaacatcttcaagaaactcttcatctcatttgttgatctcgggagaacattatccgttggaagcatggaattttgtgcagtttgagatccatgcaaaattcgtgtcagagcacaaggtttccttttctgcgtttcgtgcgattttcgggttgaaaaaagtttgtgtagatctgtgtagaagaaggttcgtgcaaaatccatgtagaagaagtattgtgcagaatcaggttctaggaattccgcgtttgtaatctgtgagaagatgtctgcgataaatgtgaagatcgacaagatttctgggagaagcagtttcagtttcaggtcaaggtagggcatctggtctagtggacatctggctcggtgggtgttttggtccagtggaccttcaggcctatgataggcagcaaatccatgttgagcatctggcccgtgttagatagatggcccttgttgggcatcttgtctgtattggatatctggcccttatggggcatctggtttgtctcggacatgtggtatatgttgggcatctggcctgatatgtatcaggcacctgaatcaattacagatgatcaagcttgtgatcaggcaggtagtggcagcaatggactaggaaaaagaaagaagaacgtaaacataaagctgttttctatgggtcccaagtcaggtgataactgtaattactggaaatactattgtttttgagaaacaatatgattttgttgttgtaacagaagatgacactaactctgaagaggattttgctctatttaacgatggaaacacacatatgtctaatgtgtgggttcttgatattggagtgtctaaccatatgtgtccaaggagagagtggttctcaatatatacagaagtagaagacggttgcgtgaagattgcacacaattttataagctatgttgttggaatcagcttaataaagatcaggacacatgatggtagcctctacacattgaacgatgtcagacatgttccgttagtggagaataatttgatatcagtgagtctatttgatagcagaggtttcaaattttctgttggaggcagaattcagaaagtctgtgaagggtctgatgtgaatatggagggtgtcaaacgtggtaccttgtacatcatacaagggtttacagtgataggtttaagaaacagtgcatctgaagagttttacaagaataggagtgagcttggtcatatgagtgaaagaggggtacaaattctgtgtggccagaaaaggctgcagatatacaatggtctgaaaagttattcatcagagttcatgatgttatgtaaggaaaaagaggtttctcgacatcacacagtcagagatacaccagaacaggattgtgtagctgaataggtgaatcagacattgttggagagagcagggtgtatgctttcaagtgctggtttggaaagaagattttgggctgcaacagtcatagatagtgatagttttgacaaacaggtggagctaaaagttgatcaacaagaggatttgaagcagcaacacgaagaaaatctagaactatacatagaagtatgtctgacagaacctacccaaacaagaatctacaccatcagaga

SEQ ID NO: 49672 - DNA, 567 bp, Arabidopsis thaliana
caaaccctttgatctagatttaattctttgtttacacagttcttggcaattgaatttgtgattagttttataaatcgttataaacatggtacaaattccttcatccaaacccaaggtcagatgaagcagataaaaccgtccctattcctaaaaataatgtatgtatctatttttaccatggacgtattatagataaacgaataaaacagttgttgacaatcatatttgtttacaagatgaatcagacaatgatgttgcagttgaagcaaaagaagaaaaaaatgcaacccgtaaggtcccaaaaaaagtgaagaaacaactagtctatgaacttgatgatgcccttcctggaggttttaagggaacaacagtcttggtggaggatgtaccaactcaaaacagtcagaggctggaaatgtctcatacatccccctatacatggttgacccttcgaaagtagagcaattaaccaatatccttaaaggagacaatttgtcagtatattctattatattggattactaattattccatcatctgtttacttacttaagcttgttatcaaat

SEQ ID NO: 49673 - DNA, 1958 bp, Arabidopsis thaliana
atcactttctgtatttaaagaaatacaagagccatttcgatagtggggattcgaactactgtcaaatcggcttgtatgccgtaagaagaccatccaaagtttgtaatggaaataattcaaataatatgtttggtttaatattttattctaaacactaataattactgtcaggagggagtaagactcagcacaactaatatagatacttttgaaacacatgtcaaatcatttatctatccaacgataggcaagtgcatggtcaagtcaggaatttaaatcatatcatcaactcatcggtacatttggcttctcaccttatcacaacataaccgaaagatatcccaaatcttgttcatttgaaggagggaatcatttctgcctaagaaacacaaaggaggacaaatctgtatatatataaaaagaacaaaacggataatgacacaaacacttaagtatagaaaaatcgtttattgttatgacgagttagataatgaaggaattgttaggacgagttaaaaaataatgttcgaattgttataacgagtaaataagatggagaacattaatcccatacatgccgaaatgttacggaaatcatagaaaaaatatattacataaacaaatatgatacatccaaaagtgccgaaactaatacaataattatacaaaaaaactaaagacaatagagagagatcaataattatacaagggattaatagtagcaactaacaaccacataatcgcaagatattttagaacattgatcaacaaaggaaagtaaacgagagtttgggactcagatcatttgacaaaccttcctagacaaccaccatagataacaatcattgcaaaagttctcataaccagctgaagcaacagcgcagtccttggcgcaatccggcgacaggattcctttgcacatagggtagataaaagacttccggtaagcagtgtgggttatcctccgatatggtcgtaactccctgaccaactcttctccccaaaccctgactctctcggtccctaaaggagcatggaaaatcccgaactgctcaaggaaatgaaccgccatttcttcgtttccaacacacatagagaatataccacaagctatggttgcagcgccatcttctggaaccaactaagctagaagttctataccccccttgaggtcacaaccttcagccaccacccttaaaccctcataatatatgacgattttgtttccagccttgagacatctttcgaaaaatggacggtacctcccttgcatcacgattccggtctcccggttccggaaagtgaacaaatcacttggatcagaacagagggagtatatgcacgcatccttcaacacgtcatctctgtacaccaagtctctaccccttcggccagccttcaatataggaccaagtagccaccaccgatcatcagcaacaagcttaacaattttcgccaagatatcatcagggatgtcaggcatttcgatacccatattgttctttttaaatgagaataaacgaagatagtttgttaggttaggggttgttatatataaattttactctcttgtataatctctatatataatccgaaataatatagtagctcgggaagttacagttgagaaataaattaattctcataccaaacatatttatgtcatcttataatttaaaaaatataaatgtttaaattaaccactccaacaaaaaacaagatttgcgtacggcgttataaaagtaagcattttgatttacatatctgtacatcgcatctgtacagcgaaaagaaaagcatgacccgttgttatctgtacaacgatatgaagtactgtacggaaatatctgcgatactgcaaaaaactagttaaatgagtctggcaatataaaataattgctagccaatcatggatattagagttctcttgttattaacctgtttgcccacaaacgctg

SEQ ID NO: 49674 - DNA, 1094 bp, Arabidopsis thaliana
gaggattagaggatcccctctgttctggttttcaagtgagctattagtattacatgaatagaggttgttaatgattttgttttagtccctatttttataactgtgatgatttcagggatcgagatcgatatgtacaaggagattaccgttttagatatggctactgtcgtcacaatcctcgaaagatggtgaagacatgggctgaaaaagaacagagaaatctcaagaggtaatacctacaattttcatatggaatcttgttaatgtattgtagggttgatttatcttgttattttcaaaacagaagccggagaagtagtcacttttggtcacatatatgtaacaatgattctggtaatttcttagttggttatattatacatgtttcattgccaggcttcatgcagcaggaattaggtgtccagctgttatacttctacgccttcatgttctagtcatggagtttataggttcgctcttatgcattatcttctgttttaatcactcatttccacgcaacactctactctgattcattagcatatttcattgatgaagtaacgatttttcagctaccaaagatagttttatctatttataatttgcagggagggatggttgggctgcaccgcgtctcaaggatgccgcattgtctctggacaagttgcgcgagtgttacttagaggtatgtcttattttctcatttagagggtcctgagtgtatcattgtaatactttacttagacctgatatgtcacgattaatctcttcttatttcagttgataattcaaatgcgagtattatatcagaagtgcaaattagtgcatggggatctcagtgagtataacatactttattttgaagtgagttttgatttatctctacaagggtcacttatttgatcgtttcgtggcagcaaaacgaaacaaatataatgatattatcttgactttttcaggggcacctttatataattgatgtttctcaatctgtggatctggaccatcctcttgcactcaactttctacgggaagattgtgaccatgtctcggtaagtgttaacagtatcctgttttaacaatgcttaatattt

SEQ ID NO: 49675 - DNA, 545 bp, Arabidopsis thaliana columbia
attttagatgtttgtatattgattggtaatattaaaagataactggaactactatcacaataaccgcgtaagtaaactctatcatacctgcacaccatcattcctttgcctacggagtttttgagtcgcctgaatttgcaactggaattcacgtactgcattgagtacttctgcaaagaatttcctcttggcagtttcaatcagattcttctcctcttcttctaaacgtgataacctctgaacaaagacttttaacacatcagcaatgccaatcacgaagattgaaagctataaaataaaatcatgtcataacaactagaaattgtgtacacttttcatttcaattctattaaatccatctaaatgagttccaacaaagcagaatctagtgatatatttatacacatgtctagttgtactgctaagatatatgagccatagttcaaaaggggccttatctcatcaggaaacttcattatcataggttaaaataaaacccaggaactagaaaagttgcaccagaatatgctagctgaataaaaggt

SEQ ID NO: 49676 - DNA, 586 bp, Arabidopsis thaliana columbia
cttcgaatggaaactgatggcgttttgagatgataggaacatctcatatatgctgatactatttgatgattttttaaactctttgttcagaggttattacggttagaagaagaggagaagaatctgattgaaacgacacagaggaaattctttgcagaagtactcaatgctgttcgtgaattccagttgcaaattcaggcgtctcatagacggtgtaagcaaagaaatgatggtgtccaggtatgatatctctgcccttatgtttttcattgctcatttttcttgtcattgaacccatgatataattgagttatgtatatccttaaacgtcataaatatacaaagtcttacaaacagaaattattgccatctatctaacaggcctggcatggaaagcaaaggcaacgtgccacccgagctgaaaaactaaggatcatggcccttaaatctgatgatcaagaggaatacatgaaactagcaaaggaaagtaagaacgaaaaactaaccctttttctagaggagaaaacaaaatctttgttagtttgggggctgcagtccagcgtcagaaagatgccaactttcagaa

SEQ ID NO: 49677 - DNA, 809 bp, Arabidopsis thaliana columbia
tgcccagccctacttatactacttgtatcaatgtctctaattgatcaattgttgcttgctattcaaatatctgtcttggcagttctcaagatcgtacagtaaggatgtgggaagttactgggggtggtaaagataaatgtttgaagcttgggtgggttgaagaaattgcacctagggctggaattattgagtacttcttttttgttaccaagtatgatacataagataacttacctatactatctagcttctctcagtggtttataacaagattttagtttgtgctcaacgatttgtattttgtttttcttatacacttattcaagcctcatctaccacttaaactaatttttaaaaagtattagtaaaattaacatggttttaactaaaaattattaattatttatcttaaggtttaagttttgaattggttttaaatttttagtgaaaatcattattattttttaaaaatgagttgaagtgtcaaatctatattacgtgaaaacattaccgaacttcgaacacttcaagacttacagaccaattaaggacgggatgcctaggcgcggttagttcccgacgtttttaaaatttaacacttaaactaattttaaaataataatagtgaaatacatggttttagttaaaagttacgaattatttatcttaaagtttaagttttaaattgtttctaaatttttagtgaaaactattattatttaattataattttactaaaaaatattttttagagaaaagaaaaataaataataattgaagaaaaataataccttgttggattttatagc

SEQ ID NO: 49678 - DNA, 1014 bp, Arabidopsis thaliana columbia
aattattaactattttcttaaagtttaaattttaaattttatagtgataaaaatgagtttaagtgtcaaatcaatattatgtgaaaacattgtcgaatttcgaacaccgcaagacttacagaccaactaagaacgggatgcatatgcgcggttagtttccgatgttttaaaaatttaatacttaaactaatttttataaagtaataatgaaattaatgtggttatagttaaaaattattaactattttcttaaagttgaagttttaattgttttttagtgaaaatcattattatttcttcaaaataagtttaagtgttaaatcaatattacgtgaaaacattgccgaacttcgaacgccgcaagacttacggaccaattaaggacgggatgcctaggcacggttagtttccgacgttttaaaattttaacacttaaactagtttttaaaaataataatgaaattaatatggttttatattattttttatttttaaaaatgttttagtgaaaaatttaaactatttaattattgttttaataaaaacatttttttagaaaaaagaaaaagaaaaaagagaatgaataaagaaatacctggtgacgacaaaaaaaaaaaaaaaaaaaaaaagaaatacctggttggatttggatacaaaaaaagcccaccagcgtgaggccattttgcgtctgaaagcccaccagcgtgacccactttgcgtctgaaagcccactaccatgagcccaccttgcgtcgttgttgttggaaactcgtctgaaattctccgtcttcttcttcattcgtaatctgagaagcttctttgtctttgatgattgctttcttcctccagcatcgtcgtcaatggaaacgagaatcctttgatctctcctctcagtcgtctctctctcgcaatctccgccgtcgggccatgatcgtcgtcaatggaaacgagaattcgaagcccaccgtgtcgtactctgagaagtttcttttcgtctttgatcaaaaattgata

SEQ ID NO: 49679 - DNA, 784 bp, Arabidopsis thaliana columbia
tcatcatcgtttccaatcgagaaggggtctcacactaaattgattttagaatctcttaagatgaaaatcaatctatcgatccctgacgaaacaaaacgccaatactcctatgaaaccctaagtaacagaggaagcccatgtttgcttcttcgcattgcaatcaaaaatctgtccgatcagatcgagggagagaggatgaacaagatcacacaaacaaaaaaatcagagtcatgtttcgtcgatgtcacaaagaatgaatcttcttcgtcaaattggatctcgtgcaagtggtggaggtacagaagaacggtgggctcacgtttgactttggaatggggttggctgtatgggccttctttgctaccaacaaggtattccttttttcatttcttatttttattttcttcctttttatttgttaaaaattagttcaactatcaatttagttttagaaataatagtgattatcactaaattacattttaaagtttaagaaaataatattaatttcattattatttttaaaaattagttgaagtgttaaattttgaaatcgtcgaaactaaccgcgcctatgcatcccgtcattaattggttcgtaagctttgtggtgttcgaagttcggggatgttttcacgtaatatagatttgacacttcaactcattttaaaataataataatgattttcacttagaaattaaaaccaatttaaaatttaaactttaaggaaataatttataattttaaactaaaaccatgttaatttcattattaatggggatc

SEQ ID NO: 49680 - DNA, 523 bp, Arabidopsis thaliana columbia
cttcagaacatcctccaacggatgggaggttgttatgttctcatgagcctgcggatgaattacacaaagaagttcttgaacaacgagttacatatatgaacactagatagcttaagatatatatacatcacatcaattgaagaaatttgttacactacagtttcttttgattttgagaaagtaccttcaggtttgtaatcatcagctgtgcagccttttttgtgccctctcttttgttccgaccagttgcagaaactgtaaggcaacaaccattcttggtcacttttagttcaacagtaaaagcaccatcctttttcgtcgctgatatttcccgatcccacttgtaagactggcaaagttcaatcagttcttttataggactaatctgaaggttagacaagtttttgaccggatctagaaatgatagcatcatagtccagacatgattcaagttgaacccacaatcgaggaaaagagcccccaaacaggattctaccaagtcaccaagaacctgcataagaat

SEQ ID NO: 49681 - DNA, 578 bp, Arabidopsis thaliana columbia
ccatgtcggaatttaataagtctgtaagattctgtaagaaacaaaaagaagcaatctgaaacatcagagcttcgtgctaatccgtagacttggactctagctcttgccgcctcgtcttttcttattttacagttttaactctaccttcgatatcaattagcatatcattgattatcactttctgtcagtaaaaacttgtatatcgttagaaaaaacactaataaatgtaatatttggcgatacaaaattagattgtataggattttgtttttctttttttcaaaaataaactatttattagaatttccaacttagactatatagtttcataatcaaatttacgattactttttgttttccatatgaatatgattatatatttaagaatgttaaagaagactaattttttcatttattccggtttgtatataaataggttaccattagatatgtgttatcttggagtactctacaaatattttctttaccaattgaatcatttcaatctaaaaaaatactgaactaatgtcattggtgctatttataatttgacatataattttatttaattgtaaaat

SEQ ID NO: 49682 - DNA, 1091 bp, Arabidopsis thaliana
  unsure (1)..(1091): unsure at all n locations
ttccttggaacaactgcaataaaagagtgaaaaaagagtctgcaaaacaactgtaagcaagatttcgtaactttgaaattcaggaagaaaattgttactgaacattaaatcaaagagaacacataaattttctccaggggatatgaccaaaggtatttagtgataccttgaactttgaaaaaatctaattacttttcttctttttacaaattatcccaaacttaactcaggccttacattcaaagccaaaacctgtctcttcaaagttctaacatggaggagaccaagcgattatctatgagattcactgtcggagaatctgttgaagctgaaggacttggtttctctgttctggtggcagcagattgatctgctctggtgtaaggctcatcacttgttgaagtagtgccttctccatctctgcagatatctgcacaagtaagaaaaacacaatcatcagcaaaaaataacaaaagctctttgctctgtaatcagaaattctcattttgaattccggcaaaagacaactacaacatctactggaaaggaacgtcgaatttgattgatttgggggggctaataaaactacagagtcatcgacatgaatatacatcctagcagtaacagcggttcaatggctgtgccttgcagttaaaagataaattaccggtgcagggcgaggtggtgggccacctccaggcccaacttggcttggtggaggcaccggtcctaagcctggcagatgagtaatgttcgagctctctgattggccagccatccaagaaggacctctgtcttgagccatcagacctgctaattggttattgttgtagtctccacgatattgacctcctccctgaaacaataaacaagattacaagcagtgagacccaaaagcaaaaccaaaaagatgtagagtttccatttagatgatttattaatctaaagcagaacatgattttaacggaatcagaactagaagtctagaaatatgatgatagcttgacaatgaaaaaagatgagaagaattattgccagaagaaatcatttctcatatctgattangaatacaatgatagatgtttgagaga

SEQ ID NO: 49683 - DNA, 1162 bp, Arabidopsis thaliana
gaagcagcctccagaaaagccccatcctcagtaacacccacgacttgtatcagtgagttctccattggaaccggaggaacaatggagataccattcctcgggttatcatacacaaaatcccccacatgaggctggtcaagagccacagggatcccccaagttgaaagataactccttggaccaatcccactaagaacaaagcaactgtgggctaccgagtgcaccagcagacagtatcacctctcctctgtcccgtatcaatgcgtgatggaaacgtcccagctgatcacggtaaaccactccaatcgcagaaacgttggaacctgagacactaggagatgaagcaagcaatactctctctacagttgcgtaaactgcaactctaatgttggaactccttgcatatctgagaagatctgcagagctgtgtctcctcccagtacgatcaaacgtggaacctccgatcttagtccccactttatgctccaaggtgaagccattaaacggatggacaccaacttcaagcaacgcatccctaattgcagtttgccaagtcctgagctgaggtctaaacacaatcgctctctcaacccactcataagactgattcacactactcagatcccaaacaagacccgaattctcaaagaactgtttatcagcacggctatagaatccagcattgatcgcactacttcctccaagaacacgacctctcgcgttaggaactccttcctcagagatgaaagactgagccggcgagtcgaaattgttgacgtcagtgagagtggtcaagaaaccgtcgtgtgacatcacgttaggtctgttgtagggaacgccaccgcgttctagcagaagaactcggaaagattgcgaaagtgtggcggctagtggacatcccgccgttcctcctccgacgattatgtaatcgtagtaatcctccgacgcaaaatcagttgcgttcgatatgaatcgcatgaaaccgggagctgcaacgaaggttccaacagtaagaaacaacaatgaaagagaagaatctcaaaatcaaattagggataagctaaacatcgatcatcgttttcttgctattactcaaaagcgatacaaggaaatcagagaaacctcatcagaaacttcttcgtcgccaaagattatgatgttt

SEQ ID NO: 49684 - DNA, 805 bp, Arabidopsis thaliana
ctcgtggtagacgaccgtttcgatttgaagcagcctggttatctcacccgggatttaaggaattactgcaaacttcttggaaaggtgatatctctacaccggagcacttaaaagtctgcagagaacactacaacagtggaacagagaagttttcggagatattcagaagaaaaaaggaaaactaatgggggaaattaaacggatgcaggatttgcttgatggacatcaaactgatgatctgttaaagcgggaagaggagctattaaaagagtttgatgttgtgttggaacaagaagaaattgtctggtttcagaaatcgaaagagcagtgggtggtggatggagatagaaatactacctttttccacacgtctacaatcataaggagacgccggaatcgtattgatatgctgcagaatgatgagggtcgctggttgtcgaatgcgcaagagcttgaaactttggctcttgagtattatcggaggctctattcgttagatgaccttgacgctgtagtggagaagctaccacatgctggttttacgagactaaattaggatgagctgaggaggctaagtaaacctttctcaccgctggaagtagaaagtgcgattcggagtatgggcaaattcaagtctccaggtcctgacggtttccaacccgtcttctatcagctgggctgggatgtggtgggtgcatcagtagtaaagtttgtgctggagttttttagaaccggttatcttccccggagattaatgatgctttagtggtgcttatagcgaaagtgttgaagcaggagaatatac

SEQ ID NO: 49685 - DNA, 545 bp, Arabidopsis thaliana
agcatgaatctgtttacctaatccagcggaagcaagattcgcacaggtatcaagaactgttgcataagtaaatttgtcaggagttatacccatctccatcatccgggtaaaaagcatctgagcatcctcgctttgttccttcattacatatccggaaataattgaattccatgaaacacacatttcctgcagtctcttattgtgcatcttttcaagctcttccattgttcccgagacattggctcgttgaaagaatcgactatgtatcttctccgcctcttctatcattccacactttgaatacatatcgatcagagagcatccgacagaggagtttgaagccattcctgatttgacaatgctggaatggatctccataccgtaacctaaagaaccaccagtgcaagctttcaatatgcttccaaaggtaaactcatcaggttcgatcctagaacggagcatcgagacaaaaagaaaaagcgtttcatatccttttccgttctgctcatgtgcagctataatcgcattccaagacacagcgtctc

SEQ ID NO: 49686 - DNA, 558 bp, Arabidopsis thaliana
caaaccaatataaaacataaatatcactttttcttttttgtgatgaagagaaaactcgcgggaaaccaaaacggtttcggttagatctaaaaccaaatatatttccattacaaaacagagtagtagtactctgttctattttattaactgagattttttttattacacacagaaaatcataaagctacttcatctctgttttttcagagtccactaccacctggatttttaagccattcaagctggatctcgaccttgccgcattcgacattcttcaacagaagaatcatgtcctgaacgatcttgccattatcggagacgattatgctatcttcagacaagcagttatctctggtgggcacaattctcttgagctcttttccatgtggaagttctttcaaaccgagtttgtgaacgtctaggaacggtttcatatctatctgcgcatctcccatcttgtcgtccgctgtaaatgtatctttatcatacaccatctgcactcatacgaaacaaaaacatatggaacaaccacttatcatcagttggttttgagttgaa

SEQ ID NO: 49687 - DNA, 486 bp, Arabidopsis thaliana columbia
taaaaaaaaaactcagttcgttttgggtttttagacaaaagtcacaataagtagaacagagtactactctgttttgtaattgaaatatttggttttagcacctaacctaaatcgttttggtttcccgcgagtttttttattctgttgtttgtttgcagatgaaaaaaaaacgtggagaagaaaaaaacaaaaacgatctaataagcttggaagtttgcttgcagatattttttttttgaaaatttttgtggttaaacatgtgaaaatgcagagatattcaaacgtaaggttatggttacatctagtaacgaatcttatccatctccaaatcccaaatttgaaaaacacttccaagggaaaaatcgcggatacatacaagattgcaaatatctaagcttggaattatatttgttttctttctttggatctctgctttcaagtctgaaacttgaactctgtttctaatttacttcaaaagctatggcg

SEQ ID NO: 49688 - DNA, 724 bp, Arabidopsis thaliana
caatatacatttctcttaagttcttgaggcgggaaagaaacgccggagatttaccggagagtccagctccgttgagaccaagatactctaagctttgaatatctccataactctctggaatctctccgctgaagaaatttccaccgaaagagaggtatttaagcttcttaagctctgacatctccggtggtaacttaccgttgaaattgttgttataagtgtcaagaacttcaagatcaaccatagcttttaaaatctctccagggaatgttccagtaaggttaccattgttggagatattcaaaaccttgagagaagttagactcttcatctccaatggtaattcaccggtgaagttgttggcagctaaagttagattcaccaaatgagtcaacatcccaatctctggtgagattgtaccaaacaaaggagtgaaggagacgttgagagagataacacgagcatcgtcgtcacatgagacgccggagaaagaacagtgagcatccggagaagatgagtgaatccagtcgtggagaccgtgtcctttaggaccaatcatggaggatttgagattgagaagaacttccatgtcagtgtaagcgaaacatggtgagaaaaatagatacagatgcagaaacagaagatgagtcttcaaaagtctcatcgccatttttttagtgtcctctcagtgagaaagagcgagagaaaataataagatagcgtg

SEQ ID NO: 49689 - DNA, 546 bp, Arabidopsis thaliana
caacatgtacaaataactattgatatccttgtagcttttttttgggctatctttcaaatcacaaaccgcatgatatttcctcattagcgttgtggagtatgatatcttcacacctaattttgtctgaaccagttccatgataatccttggaactggagtatccatttgtcccggaaacttatcatgaataagtgctgcgactaattgtgagttacctttcctttttctgatcctactactatttttacttagcccaatgcaactatgtatcttattgtaccttctaatcgagaagatgtaagtattacggatatttgacgctcgtaaacaccaagaacaactttttttagcacacttaaagacatagtgctccttatccgactttttaatcacataaccaaaactgttaacaaatgcaactctatccaccacctcgtgcaatgcctacttgtgtggaaatttttgacgtaaggacaaaccaattccttcttaccattcttttttaaactgaccatgttctacagcaggcggcggctcaacatattg

SEQ ID NO: 49690 - DNA, 1139 bp, Arabidopsis thaliana
tgtctataataaaaacacaccaatatcaatttacacatagccaaataagagtctcaaatgagtcaaaatattaaaactgatttatgaaaacacaaattttataaaaataaatggtgaacaaatgtgaagattagtgaaagttcctattttgaaaaacaaatgtctttgaaacccaattaatatgccttgtaaaccagtccatagtatcaaactccaaaaaaaaaaagttacttttaatttcaaatatttacataaaattttgcatgcactactctgttcttatataatcttcgtcttcttcttctctgcttgagtcaacaagaaataaacagagctaaaatgtttcctctaatctccttttctccaacttctcttgatttcaccttcttcgccattatcatctcaggtttcgttttcatcatcactcgatggaattccaattcaaagaaacgtttaaaccttcctccaggtccgccaggttggccggtggtcggaaacttattccagttcgcgcgctcaggtaaaccgtttttcgaatacgcagaggatctcaagaaaacgtatggcccgatttttacactgagaatggggactcgaacaatgatcatcctctccgacgcaactctagtccacgaagctttgatccaacgcggactctcttcgcttcacgacccgccgagaatccgacccgaacaatcttcagctgcaacaaattcaccgtcaacgccgctaaatacggtccagtgtggcgatctctgagaagaaacatggttcagaacatgcttagctcaacacgtctcaaggaattcgggaaactgagacaatccgccatggataaactcatcgagaggatcaaatcggaagctagagacaacgacgggctaatctgggttcttaaaaacgcaagattcgctgcgttttgtattctcttggaaatgtgtttcggaatcgagatggatgaagagacaatcgagaagatggatgagattttgaagacggtgttaatgactgttgatccacgaatcgacgattatcttccgattcttgctccgttcttctctaaagagaggaaacgagctctcgaagttcgccgtgaacaagtcgattacgtcgtcggagttatcgagagacgacggaga

SEQ ID NO: 49691 - DNA, 505 bp, Arabidopsis thaliana
tggaccgttaaagaggtcacttcctggtatccagggaacggatggtagattagcaatggaggttcgttgttgcgttaagttcccgggaacgcaggagctggacgcggttgtttggtttctcgtccacgtgtaccttaggggcgagtagctagcggtaccttgggaaggtaggcattgtacgtgtctcattccctgttgttgggtattcgacgagagtgttcacgggtgcctgtaaaaatgtgacctgctggttgataggaggtgagacctctatcgaggcgaagtctagacgagtccttggagtgggatctgttggggagacggtacctgtcagatttatggtgatatgggcaggaacccagttttgcggggggggggggggggatttccttaccgcggtatctcgcgctctacctcctgtgtcatgcgagtggagtcgcgtctctgctaacccaccattgcggcgaggttgcgatgcgcaatttctttgtttttgcttagttga

SEQ ID NO: 49692 - DNA, 381 bp, Arabidopsis thaliana columbia
gtaattatttccttagattctgtccaccatattcggcttactacgacttatccttatatatttgcaatcttaacaattatattgctacctactgaatctacatatacatttttacaggaattttagcaattaaattctcaagttagaacttatttacaaggaataccattgacattaattattatcatttaattaatattcctaattattagcattttcttatttaatatatttccatcaattctaattacttttaaaaaggagaaatcttaggactttattaatattatactttattaaagataaatactatagttatttaaagtttataaaatgtttaaaatatttaacgaaaaaacttttagaatatatatattatat

SEQ ID NO: 49693 - DNA, 648 bp, Arabidopsis thaliana
ccccggttatgaaggatgatgtaagagagttatttcatacgtggccaaatcaagtagaagacccaacacttgatcacttgatcgaaaacatacatgagaataagtttgttaaaggttatagggatgtgaagagaaatgagaagaagaacaaacatgtaaatggtaaagtagcggttgagtctgaatctcacgcaaagaagccagaaagtctcccacaatgaggggtggtgaatattatgaaggacatgcacaaaggaagaagaagaaagaaagaagcaaaggtagtgatttgtgaacaaaagtgaggctggtgaatctggtgaaggagatgcacaaaagatgaagaagaagaagaaagaagctaaggtaagttatatggtctatggtgagtttatattttatgtaatgtttggctagcttgttagtgtttgtttttttgtatgtattgcatggtgttagtgaggaggatgatgttctcgaagatgtgttggttagagcagtcgtggatatggtgccaaattaactcaagtttaacactgttgatcaagcattagagaaatgtctcaaatctagagaaggtgattggagatagagtggaacgaagatggatcgaaagttggaaagcggatttggatatattgatagtga

SEQ ID NO: 49694 - DNA, 608 bp, Arabidopsis thaliana
  unsure (1)..(608): unsure at all n locations
tggagctcaaacatatgaaatgccagcactaaactctgaagatatagggcgtaaggattttttaaggcgaggcatttggtgtaaaacatgtgataactagacgattcttgagccatatgaataaagaaaaggggacttatctagtcgaatagaagaaagagtttcacttgaaaaaacagcggctttgccatctggtcctgattgaatccaagcatttaacatatctacaccgtcctcggaaactaagctaactattttagcagctacgtgatcaggcatgtggaaatcagggaacggaggaggctgagagaaaatgagtacgaacgttaacactgaattttggaggctatataccaattcaaaattaaattttgcaatttttggttcaatttcagtctatagaaaatgagtgtctcaattggattgagaaatttattgagtagacattacctgtaagttaaattgaaccaaaggttgacgaagaggctagacggcaaattgatttccctaacaggggcaagggcgcttcgtgatcgccagtaatgaagaaccccaataattanagaggagcgaaccaggctgatgggaaaggatttgagattgtgatg

SEQ ID NO: 49695 - DNA, 562 bp, Arabidopsis thaliana columbia
cttagacacacgcaatcaacctcacgtggtttaacttctaacaacaaattcataacaatcatcttatatatatatatatataaacatacacatcgtaaggtccagtcatcctcgtgacaactagaacctcataagtggaggctggccctcgtggctcagacactcccattctgggcttgtcagccgttcgtagcgcgctgttaacccgtcggtccatcactgtccacatcactagggagaccacggcccatagctcgattctccccagtcttacattcatcatacatacatactcataatcatacttaacatacacatatttattatattatacataatatcacattatcacacatcatactcaacaatcataaaatcatatcatcatgtaatcttatactacacaatcagatctaagcctacatatcatgcgtcaagaagcataacaaaagaaaatgatgatatgtttcgcaaataccaccctcaccttggcctagtgaagatgaaaactcaattctccttctcttttcccttagacaatctttactgtaaccatgatcat

SEQ ID NO: 49696 - DNA, 456 bp, Arabidopsis thaliana columbia
gagtaataaatgtgtgaagtatatgtttaattatttgataaaacatttgaataaattgtgttttatataatatatcattgaacatttatttttgtcatgaataatcgctatgtaaaattatttcaatttcaaaagtataagaaaactatgatactactacttggcgactaaactataacttggtgggctttcaaataacgaagcctaaatccaataaagatgtgacaataatacgactactcaatgacgacatcttactttgttgggtttctaaatatcgaagcccaaacctaataaaagcagtgacgcttatgccattaattagcgactataacttaatttgttgggttctccatatcaaagcccaaatccaataaaatatgacaattaacgactactacatgacaacgttttaaattgttagcttctacaattgaagccaaacccaatcatttg

SEQ ID NO: 49697 - DNA, 669 bp, Arabidopsis thaliana columbia
tggtgtgttttcaggtgcagaaggatctaaaaaggactctactcgacctctttactcgatccaggatgctcagaggaggctgcagtttactcgacccttttattcgatcaaggcaaccttagatgaagcagaagattgatctactcgcccctcctactcgatcctctactcgacccatttactcgaccaagggtgaccaactctacaagacttgttgagctatcaaagcgtcttgggatcctcctcattccctactcaaccagacatctgagcatacagatagcagaggaagaagcatctactcgaccaattgatcactcggagcataaacacaaaggcgcagactttgcattcaaatgagtactcgatccccaagatcaagtattcgccgaaaccgcctcaagtctcttgtcttctagtgaatctagggtttcaacattttactataaatagataactttggggtttgtcaaaggatctagtttttacctttagttttctttgtgtttatgatcttaaccttaattctcttaactattcgtttttgattgattgttaaaaaagttgttacttgtcagactacattggatgttcagaattttgggttgtgcctgagatgtcttgagagtgatagggtctgagatgctagataggtactctagtagtagg

SEQ ID NO: 49698 - DNA, 553 bp, Arabidopsis thaliana columbia
acaaaggcttcttcttggctaatagtttgtttgatgtttggatgatgtgtttgctgttggattccattatgtgtttgatgtttatcttgcttctaaggttaattcattttatttttagtattggcttgtaatgaaatggtattgtgtgttcggccatgttaatctaatgttatggctgagttaatataatgttattgctgagttaagttaatattgttgttgagttaattcaacgctatgactgagttatacgggtaatgttgtggctgagttaattcaacgctatgattgagttattataatgttgtgtctgagttaatctattgatacgaatgagttaatcaattgatatggctgagttatgtttgagttacgcctaaattatgataaaatttaacaagtgacatcaagcgataacaactgattatagtgaaaagacaatcgtagataataggagatttaaaaccattaccaaaaaaggagatataaaaacatagttgttaagtttaaaagggaagacaagtaagagatacaaaagcactcaagacatgaa

SEQ ID NO: 49699 - DNA, 536 bp, Arabidopsis thaliana
ccccctcttcttctccgatctaattacggcgcagagtctcttcgccgcctctcttcttcttcgatctgtgctcgagaaccgccacgtctcctcttctccgactcgatcggttttgcctcataggtaacctctgtttctccaatctaagttcttctctcaaatccgacttattcttcttctccgatcttactctttttcccagatctaactcttcttcttcttctctaatctgttatactcatcgccgcctctcttcttctccgatctaattacggcgcagactctcttcgccgcctctcttcttcttcgatctgtgctccagaaccgccgcggctcttcttctctgactcgatctgttttgcctcaaagataactctgtttctccgatctaagttcttctctcaaatctgacatattcttcttctccgatcttactttttttttcccagatctaacacttgatttgttttttgtgcaagatgccgtcagataatacttatgtccggtttagacaacagcagcgtgacccgttgcat

SEQ ID NO: 49700 - DNA, 613 bp, Arabidopsis thaliana
gatcaaggtataaagaaccggttccgttgagccgatgagcgagcgaacttggaagagatcctctgaagagattacttgacgaaaggcgttagagaggagagatagcttcgggtaatgacatctccggagggtgcgatagtgttttcgattagtactggtgggatttttcgaggaatcggaggaacattctctacttcttcgtcttgatgatcgtcttcttcatctgcttcattcgggttctcgttttgattctctttttcttcttgtgggttcttgtggggttcttcgggtttctggtttggaacgccgccgttagagccgtcgtcggaagtttcagagatactagccatcgccgtgtgacgtcagcagcaacgaattaacggaaagcgagactaataaatttggtttttgaaagaagctgttacgttgtatgttttttgtgtatttataaggaaccatattgagtaaataaatactctcttaagtaacccacggattttcagaaaaaattgtttaaaaaaaatgtttaatcagaaataaaaatccaaaatgataatctgtaatatttttgttcttcttaaatatctttttaattcattaatgtattaaatat

SEQ ID NO: 49701 - DNA, 477 bp, Arabidopsis thaliana
cagtgtgctttaaagtgccttcctttatccttgtgcaagcattattattattataggttagaaactttgcttagggatttgctctaaggccccattttacactcgcttatacaacgtattaggccccattttacaatcgtctatacgacgtcgttagtgtcttcgttattataataaatacgagcattttttcaaatatcaaattcaggctcactttcagttacagttaattcgttgctgctgacgtcacacggcgatggttttcatctctgaaacttccgacgacggctccaatggcggcgatccaaccaagaatccgcaagaagaagaagaagagaatcttcctccgattcctcaaggaatcccagacgaactcatcgaaagtaccgtcttactaatccggagatgtcattacccgacgctatctctcctctccaaaacctttcgtcgcgttatctcttcttcggaactctacaa

SEQ ID NO: 49702 - DNA, 610 bp, Arabidopsis thaliana columbia
gggtgtcaatctcaggtcctctggagttgtgctgaatacttgattaaacatggaagtttctctcttgagggaggttgctcgtggaatgtgacacatatggttgttataataaaccatttccattgtcatgagattttggaggttaatatatactttacttgttcattattttatttggtgtttgaataaatgatataaatggctcttgataatctgcattcattgagatatcaaatatttactctagagaagagtgtcatatagattgatggtccacaatcaatgaaatttttgggagacgaacatgtataaccatttgcttgaataaccttaattaaaaggtgtgattaaatgatgtttgtaacatgtagtactaaacattcataaaacacaaccaacccaagaggtattgagtattcacggctaaacaggggcataatggtaatttaaagaatgatattattttatgttaaaccctaacattggtttcggattcaacgctataaataaaaccactctcgttgctgattccatttatcgttcttattgaccctagccgctacacacttttctgcgatatctctgaggtaagcgttaacgtacccttaga

SEQ ID NO: 49703 - DNA, 297 bp, Arabidopsis thaliana columbia
  unsure (1)..(297): unsure at all n locations
tatttcttctaggttaaaacttggaatttccaaattaattaaactaatgaagccagtcactattactntcgagaaagggaccgggaaattcaaaatacacgtgtggtataaaagggcgttaaatagtgctttatttcatncaanaggcnctgtctgtacttttctcttgatagtattactttatgtgtaacaacacgaaacatcttgtatatacaattaagtaaaacgaaactttaaaacactctggtccagtaacacgtgcgtctctttattaagtgcaaaataccccaaacttaa

SEQ ID NO: 49704 - DNA, 604 bp, Arabidopsis thaliana columbia
gtggataattgacatataaatgtaatgtgaattaggttggcggtgacgattctagtcagaaaggacagaggaaaaagtccagttctaaaatggattcccaatctactacgccactaaaacgagctaaagagaatgagtaggtgtcaagcacaaaggtagtactatttatgtctgtagatttcctacactagcacttctttatgttgcattacacccacttactttcactattggatattgacagattggaaacatagaagaagtgcatgcacacaaccctgtaagacttgatagttatgtttatagtaaaattatatgttctacatgtgtccgctgaactatgcacatttgtatatgtttgcaggatgtcgttgcaatagagcaattggatgatgaagtagacattctgggacctattttttcattgggcctaacgcaagaaactatggatgacatcagcaggtggttccaagagggaagaagaagacatccccagaaaagttgttgttttgtggccagcaaccggattagggacagtctaagcatgagctacagaagagtgtaagtctttacactgactatattttcatgagacttggttgtg

SEQ ID NO: 49705 - DNA, 1034 bp, Arabidopsis thaliana columbia
ctagtaacgtccgccaatattatttgtagattttaaccaatttacaaaaatttcgagcaggaatcgaagaaaaggactatttgacccttttcttcttcctcctccctcatttctaccaccacgatttcttctttatttattagccgccgaaggaattcctccggcgccattttttataatttttttgtttttatctttagagatgggaaccgaaattatcaggcctcaaaattgtttggttgaccggatgagagattctccggcgactttttttaactcccggaggaatcattttcaccggaaaccgcctctcaaacctgatcaaaggagaagattcggttccgatgagttcagaacgacgacaaagaacattgttaggagaaaaggagagtcttttgactcattctcaaacatcaaagttcgtaaatattcaccggagtttctgccgatgatatttatgccggatcttcgatattcgctgtttccccagcgccaagctcgttacctttgccgtctttctcgaagaagaaagcgaaaagccaggttgttgtcgtttccattgatgactcggcctctcaagatctccggagacttctccggctaaagttttgagactatcaattaaacgaaaaagttatcgaaatcgtcagttatttaacggttaatatataaaatctaggaatcgtctccgttactgttttttaatcttatctttcctttaaatatcttgtttagaaagggatgggtatgaaaaagattgaattaaaagtatggggtcagatttagaaattaatgttaaatattaactgacttttttgaattctttgtgtaatgtggaaatttaaaactgaaatcctttgagatccaaatgtgaattaattaaaacgatatgggctgaaagaagtattcgtttgaggcccaataaatatatttaagtttaaagccttttaggtgtcccaaactgcgtagaagaatgggaggattttgatcaggtttatagctagattttgtgcacagaagcagtttgtgatgtg

SEQ ID NO: 49706 - DNA, 557 bp, Arabidopsis thaliana columbia
cggtatatgatgagtgggtcgttggatggaagttgtagctattatcagattatatatataatttaattactcaaaaaagcataatatatattctttctctatttgtacctttttttttcttctttttcttcttcatcgtctacttcttttatcttcatcgactcttctccttcttttctttctctatctatctctttcttcatctttcagtctttctttgcaaaatcagacatgagagactttctcaaaatcgtgtagcttttgtattttcctttacggagaagcctctctagatttaagtaacgattaggcttattcgattggtttcggagcggcacgcctatgtgactaacgatggaagcttgagtgtagcagacagtaacatctagagatgaaagaagaagaagatttgttccctcaatcttacaaccaatcgatccaggttttgcgacgattcttcaattctacgaatagaatttagagttttgttagattgtgtaaatatttgattcatattagcgaaattgtgtttgtgaagacgatgagatcggttgcag

SEQ ID NO: 49707 - DNA, 645 bp, Arabidopsis thaliana
ggtgcaagaaacatgataagttacttgccaagtgcctcagggctatcaagtttctgaaggacaagatcagctgctcctcttccactacagctatcccgcaggacatcttcctcaggacatgccttcgaggagatatgatgcgcccgagccaagtcagcgcaggcctgagcctagagagcaggagattccgcatgtccctgcgaggcattcatcattcgagcctcgtgaatctgggaggaagaggaggaccacactcactcgatctagaagtaggagcagacgacttctgcagtctcgtagtttacgcgaccgcgatgctggccgcagccgaaggagagaggtcgagtatcctcagagcggtactggcggccacaaagctgatgaggtcgagtacccacctgctggagctgatacggaacaaggcggttcgtccatggcctgggagcaaacacagacagccattgacgagcaactacgttcattcttcgactgaggtaagcgcctcacttcaccattgtattatatcatctgttgtgatttgttcttcattttttgtacggtgattggatttgcctgagtatctctccaagtttatcacatagtggactgtgtgattaagtttggggaaggctcaggaagtgtgtg

SEQ ID NO: 49708 - DNA, 561 bp, Arabidopsis thaliana columbia
caaaatcgagtaccgtcttcgagtgaaggagagagtgaaggcggtggcgcgaacgacgacggttgttttgtggtcgagtgaaggagggagacgaagccggagggtgagatcgagtgtctttgtgtggtcgagtgtttggagaggaagagagatggtgaggtttggtcgagtgagtgttgtgaggaatagatggcgtcggtgggaagagatgaggttggatcgagtggctgtgatgaagccttgggatttccttatcactaaaaacgcgtgggggggacaaagaagagagaaggtgggccacacttggtctgtttgtcctaaagcactgttccctgttgactagaaccttctataatcctttgtaaacttgttaaactccctgcaactctctgtagcttctgttggtcgagtataagtataatttcaaaattttggttttttaaaatcatcactaatactcgaccaacttactcgacctcatggcctctgagtgcaacagaagtttttcaaattcttgaattctgacatactcgatcccatgttgctctgtagagtaagatt

SEQ ID NO: 49709 - DNA, 553 bp, Arabidopsis thaliana
tggccgagtatcaccatcatcattcactcgaccaatcactctaccacctagtcgagtctcaccatcatccgccactcgactaatcactcgaccacctgggttgagtaccgttcataatccgtcccaagactgcgtcgttttgagtattagggtttcagaatattttgctataagtagcatgtattttacatttttgtttagataagttttattccgcagacattgtgttctagacgtttttgtaatccggatttctcttaatctatttagtattgagtatttgcttcgatttcgtttactatgttgttcatcttgctattactctattgctatcatgtttccattgtattcattgtttatgctttctgctatgatttctgagtagtgattaggttactgaggatgggttagagtagtttagaattctcagtatgctaggtggttgagtttgatttatagattccttctggattagttgttcttaatgcctattgctttctgatcaactggaatttgacccagacatttcgcgcccagaaggtgtcgatgaatg

SEQ ID NO: 49710 - DNA, 574 bp, Arabidopsis thaliana
tacaattatcttgtttcttacacaaacaacttattcaaataaacataagttcaagtagtgtttgggcaaagataatctaaggatcattaggtggaggacttggtagacgttctgtgggtgtggaagagtgagtggccatgaagtccaagaactgcggatcggtttggcggagatacttctcgactaaagacaattgctcgagcttgtccttttgctcagctgtgactcgggctgactcaggttctcggggcagcaatctcagcatctctcttctcattatatgtagcctgctcttctattttcctttgagcttcctgcagccgttcttatagggcttgaaaggatgatgaggaaccggagagttggcggttggcactgcctagagtgtcttttagacatctaagtccataaggattgcctcttgaatccctttctgtggactgcaagaaatagagaagaagctaattagtgactgaatattaattagactctaagactcagaattagactacaacatctgacctcgagaaagatggctgtataatcactagtgtgaactccggagtcgtgaaga

SEQ ID NO: 49711 - DNA, 563 bp, Arabidopsis thaliana
gaaaaggatacacaggttaaaaatgactggaaaattataattatacccttcattaaatttcttctgtgtacgtatattcaatttacagtgtacgtacacaaaattatttagtcgaatgtatatggtacaatttctaataactaaagctattttattacgtattcttatatctcaataatctccatacatacataataattaaatagaaatagatggtgcaataatatttgttcctcatattgaaagttatgtacgtatatgtgtaataatgtacgtatatttttgttgataaattaatgtatgtacatgtgtaataatatacgtacatctttgtttgtaaattaaattactaagaaaattttattgatacaatattaaaccaatattgacagtgggcgagatatattctaagacgttcatacgatgtgattttgaaacattctgaattcttgacgacttgagcagtcaaatgtcatagacaagtatcatcaacgcatatcatcccaatcttgtaggatatgacctaggttgcttatagcaaaacaattgtttgattgcgagat

SEQ ID NO: 49712 - DNA, 593 bp, Arabidopsis thaliana
ttcgtctagtttttatttttctattgatactcacgcgtttcttgtttttcttcttttatgtgtttcaggtgtatgtctaggctcatacgaagcactaaacagaaggacctgatcaacttatctgtacttgatttgggaatactcgaatacaccaacccaaaaaactcagaaattagcaatggttgacagagtcatcagagctgatgagcaaagagttttacgggatggagatgggcaagcctacaatgtggctggtcagagattggatgaccatggactcatcacccttgagaacatcaatgaggaacaagcgcgcctcaacgcgcatgttggctgctagaaacgcagcagggctcagtgtcaagggacactaattgggtgtcgatcgacacctacgggatcagaacgaagaagagctcggtgtcgagcgacaccacctaggtgtcgatcgacaccaaccaaaggttcctgccgcagctaatccactagctgttgaaccacgtcgtactcttggggatttaacaagcttgacctgttctatgccaacgctcagcgatcgtaccccaaccttctagaggacgactatgagctga

SEQ ID NO: 49713 - DNA, 572 bp, Arabidopsis thaliana
cgtggttctagaaatggatgaagaacctaaagatcctctcatattgggaagacccttcttagctaccgctggagccttgatagatgtcagaaaaggtaaaattgatctaaaccttggaggaaacctcaatatgacctttgatattaagaaaaccatgaggaagccaaccattcagggtcaagttttctatattgaagagatggatagattggcagatgggttgcttgaggaacttaacgagaaagatcatttacagagtgctctgaccaaggatggagagcatggatacctatacctagaaactcagggttacaaagatctattagattcccatagaccggtagaagcatgggagacatttgaggagttggatatctgttcaaaggaggtcagttcagtcacagaaagtgaagaaagttctactcgacctgtgtactctagcagtcaatcgagcaagataacagaggaacctaactcgactggaacagccgaggacactcgatcgagcaccatctctgatgattggtcagaactcaaagctccaaaggttgaccttaagcctctcccaaaag

SEQ ID NO: 49714 - DNA, 454 bp, Arabidopsis thaliana columbia
taatcacaatcattctatcttaaacgtatccgtttctagtcttcaaattaattatccgaacgtttgaatttgaatccactccgggccttcttgacttcaccttttggcccatttggcctcttcaatccgagtagtcttgacatcgacgccgcattcacttcgcaggtcaacaccccatccatattttcacctcgagaacgcttatgggccttctctgttatgggcctcttttatccacgtagcaatctttgtccggatctgagcccgtggtgcgggatccgacaccaacagacggcgcctggtatgaaagggatttttcgtgtttaagtggtggagttaaagtgtttagggttacgtatagtctcgaatgcaggatatgttgcaaaaccgcaagagagaacagatcggttgaggtcacaatttccaaccacttcttcttttaaacaccttcttc

SEQ ID NO: 49715 - DNA, 607 bp, Arabidopsis thaliana columbia
gactctaccgaactaaggtttaccatatactgtattagttacgtccacatataacaacattactttaacaatttttcaatgcatagtaaattttcagaaatactcattctaacaatttacttttttgagggacaatacttttagtttgcaacaaaagtagaatagaatatgataataaaaatataaattaataaaaacaaaaaaaaattaacaataatgagacatactatgttttttgaagctcaatgagatcatgtgatattttctttcctctatgcattttcttcatcatcgtctccttatacatttcatgggactaaagcgtgaactttcaaatttgggacgaaaaaacataaattttcaaaatgccataaaagtcctaaactttgctctaactttttgaaaaatgatcaactttcgttgactaggccatttcggacatgacattaattttccgttaacaggacaataacagagtttactttcaacgacgtcgttttgaattcactaaaaaaaaagaaaactgagtactttaagattgaacccataaccttttgatggatataacaacttgcaaccattgagccacgacatgataatgttgtta

SEQ ID NO: 49716 - DNA, 659 bp, Arabidopsis thaliana columbia
gatcagtagtggtttaaggagtttgtacagttgcaaattggaaaaaagtatatagaaaaacaaaattatgatggatggcttctacaaaattggaaaaagtattaaaaaaggggaaaaatgtcggaaaatgcgccaactttcaaatttgggacgaaaaaagcatgaactttcgaaatgtcatttaaatctcaaagtttgagttgacttcttaaaaaatgtctaagtttcgttgacttggtcatttaaggcattccgtgaaatttccgttaacagaaaaataacggagtcaactttccgttaacagttcaaaacgacgtcgttttaaaaattaaagttaagaagaaaatcggacacaacctagtgtcgaaccgacgattccctgcagctgtaattaagccttcaacgatggagccactgtacacttgtcacaacattgattgacctctatatccccctccctcgttgccactaatagacctccattgttgtctgagacgaaaacggcgtgacgaggtggcgtggcatcacgtgacatatgagcgtgagattgagatcgtgtggctcgtctatgtccaatgctggtttgtctggggagagtaccgttctcgcatttatacaattggagatccgtttaattttgtagatttcccgtattgttg

SEQ ID NO: 49717 - DNA, 686 bp, Arabidopsis thaliana
cagacactagaatcagttcaagattgctgctcaagttggctggtggaaaaagtctctccagaagagaaaggcaacagctaactcgaacgacagctgatatctttagattagtgccatttgcagtgttcatccttgtgccgtttatggagtttttgctcccagttttcttgaagctcttccctaatatgttaccatcaactttccaggacaagatgaaagaagaggtatgtttcaacagagtgtaggctttactcattcgtttactaccttcttgccttcttggtctctttccgatgttgctcttttgttaatgcacaggaagctttgaaaaggaaattacttgcaaggatagaatatgctaagtttcttcaggaaaccgccagagagatggctaaggaagttaaacattcaagaactggagaagtaaagcaaaccgctgaagacctggatgagtttctagacaaggtaaacagtcataattttgtgttggctcaaatacttcctcttctttcggtttttggatttgaatttcattctccttgttcttaaaatcatgccttgcaggttcgaagaggtcaaatagtccataatgatgaacttttgggctttgcaaagcttttcaacgatgagcttactttggatacattagcaggttagtcgtttcttttttgtttgatctcagagat

SEQ ID NO: 49718 - DNA, 924 bp, Arabidopsis thaliana
tcccccacaaaagtaaaggttgaattgggaaatttggaataacaccgtcacaagttaagtttcgtttgagactcacatttaaatcaactttactctatctacaaaacgtttcgtatgaattcttttaatagcctagtcaacatatctcttgcacatgcaagtatacaacaaacccttgatggatagatttatgggaaatatctcattcaacaacaaacctaacaaaagattgttgatgatgccagttaaataacagagtactactatcttaaatgtaaattatcactttacaaaatagactgtataatgaaatcacattgcaacctatcgaaagtcacgcttaccaatctaactatcttcttcttcctcctcagatgcttccttgagccactttatgaatgactcacatttattcagataaactttgtcacaatcgtctgctcctgctttctcttccccccatctcaagatcgcatcttcttgcaccacgtctttgtcatacagaaaaggcagaagtttagcaaacaaagggctcaactcttcagattcctgacacatctcttcgaatttcattatcacttctatctgtgcatcagtttgctttaaatagaacccaagaactcccttccatttagttatgacacccatcgcgtttctgtacaattcagtagcagaattatgtggactctttactgccagtctcatcatagagtagaatactgctccagcacaatctgcagagtccatgttgtacgccaaccggtgtgagttaatcaaaggaattacaatgtccgctttgttatccttttcaacggcacttaagaattcttcttcaacctctctctcaaagtcgccataggaatcatttgcatcagtgttaataatatcagtatcagatttcaactctccagaaggtgggacaac

SEQ ID NO: 49719 - DNA, 580 bp, Arabidopsis thaliana columbia
tgtttaaaaagaatgaactttcaaatttgggacgaaaaaaacataaacttttaaaatgtcacttaaataccaaagtaattgttgacttttaaattaaatagttaacttttgttgactttgccattttggacctaacgttaagtcaactgacggaaaaattaacagtgttaagtttttcgttataaattctgttaacttataatcggcgaagttttaatattataaaaatattaaaaagtgaagaatcaaacataacacctttgagatgaaacgctgatactgaacctactgagctgagacatcgtattgattgtacacaaacttagatacatatatagcttaaataaaagctcgataaatgcatccatggcattaacttccgattcgggctacatttctctgggactcactcttaagatcgcgaatcaagatctaaaccacgacgattagaaagaattgaccatcttcgcatcttctgatcaagctttctccaaatttactcaccattttcggaggagtaatcaatcgacttctctcttggaaagaacttttgaaattggttagggaaagattgattatg

SEQ ID NO: 49720 - DNA, 596 bp, Arabidopsis thaliana columbia
  unsure (1)..(596): unsure at all n locations
cagtcaacatatctccttcgcttacgtcaacacactttgcgtacttatttcccgacatcttgaaacgccactccttcattgtctttgcattcccagccaccgaccaataccataactccttcgtccatccttttatgtctttcaaacacaacataaataattgcatttatcacaaccaaacaaacaaataaaactaccaacctaaaacgaatcgaaggaaagaaatcccagacaataaattttacctcctccgcaataaatggccgtgtcttcaacaacacctcctaaaatccctagtttttagtctgttcaacacaacatctttcctctgcaacattaataacaattaaagtgactaacccctatattaccatttttaaaaaataaatccacataatattcaatcggtaacggaaacatttattacggaacagtagctacctcttttcgccggacgaagttgtcgctatcttcgtcagagcgctaaccacacttaagggtaatttcgttcacgaaatttcacgtgtggtaaaatatggcagattttgtaaagcctatangaatatggcatggattgtaaattctgagtgaaatat

SEQ ID NO: 49721 - DNA, 817 bp, Arabidopsis thaliana columbia
tatatcaactccactaacaattgtattttgatttgtattttggttacaaaaagctttacattaaaaaaataacacaacaaatacaaatggggaaaaatgtctgaaaaaagcgctaactttcaaatttgggacgaaaaaaacatgaactttcgaaatgtcatttaattcataaagttttctttgaatttttgataacattgccaagttttgttgactgtgtcatttccagcatgccgtaaaattttcgtaaacgggggcatttcggacatgccgtaaaattttcgtaaacggatttaactttccgttagaattttttgttaaatcaaaacgacgtcgttttatgagccataatacgatgtcgttttgttagaaaataatttggaaaaaatacatccatccggtattgaactgatgacctcatgcacgctgggtagtgggaaatggttatgagtggattggcctatctatcttatatattagtcaagatatcttggcttttccatgtatatatggtgttgttatacctaatacactctctcaagatgatgactctagccattgatctctgtaatgttctggcgtggagtgctatgttaccatattagaacatggacttacaattcaaaatcaattagcaataagtggattaacccatctatcataaaagaatgtgagatattattatctctaataccaagttgccgatcttctaaattaatttcgagttagcatgtttcattattgctttcaaattcaatgaagtgagaagcagaaattccacaattttgaaataggaagaacgtagaaaccaaagttg

SEQ ID NO: 49722 - DNA, 637 bp, Arabidopsis thaliana columbia
gtgacgtttttgtgacgataatgtggagtcccaaaagttggtacacctaatttctaatgattttaaacgttttcgaaaatagtgttaccattttgcgaccgttattaagagtcacaaaaagtaagttctgcctacttacacctaattattttcgggaaaaatgttgaaaaatgcgccaactttcaaatttgggacgaaaaaagcatgaactttcgaaatgtcatttaaatctcaaagtttgagttggcttattaaaaaatgtctaagtttcgttgacgtggtcatttaaggcatgccgtgaaatttccgttaacagaaaattaacggagtcaactttccgttaacagttcaaaacgatgtcgttttaaaaattaaaaataagaagaaaatcggacacaacctagtgtcaaaccgacgattccctgcagctgttattaagccttcaaccatggagctactgtaaacttgtaacaacattgattgagcttatatatatgtaactagttgaaactaatagaactccattgttgcctgagaagaaaacagcgtgacgaggtggcgtggaatcacgcaaatatgagcgtgaggttgagatcgtgtggctcgtctatgtccaatgatggtttgtttggggaga

SEQ ID NO: 49723 - DNA, 627 bp, Arabidopsis thaliana columbia
ctgaatcagatgtaatcaagagttcacaatacttgaaatcgacaacattaaacggatctccaattgtataaatccgagaacggtactctccccaaacaaaccatcattggacatagacgagccacacgatctcaacctcacgctcatatttgacgtgattccacgccacctgctcacgctgttttcttctcaggcaacaatggagttctattagtttcaactagttacatatatataagctcaatcaatgttgttacaagtttacagtagctccatggtttacagtagctccgtggtttacagtagctccatggttgaaggcttaattacagctgcagggaatcgtcggtttgacactaggttgtgtccgattttcttcttatttttaatttttaaaacgacgtcgttttgaactgttaacggaaagttgactccgttaattttctgttaacgcaaatttcacggcatgccttaaatgaccacgtcaacgaaacttagacattttttaataagccaactcaaactttgagatttaaatgacatttcgaaagttcatgcttttttctgtcccaaatttgaatgttggctgcattttcaacatttttcccaataaagaatactatcaaa

SEQ ID NO: 49724 - DNA, 532 bp, Arabidopsis thaliana
ctagagctatgtaaggtctcgtattcataaatgacactgtaagtcatcataaatgacactggtaagtttattcctcttcattctctagtgcttagggttctctttattttcagggcacatcagctattgagggcattttcctagacatgttgaatcttaaatttgatgcaaatcccaacgtgttcgagaaaatgtgtaaccttagactgttgaaattgtattgctccaaagcggaagagaagcatggagtatcttttccacaaggtcttgaatatttgccgagcaagctaaggcttctccattgggaatattatcctctaagttctttgccgaaaagttttaatccagagaaccttgtcgagcttaacttgccaagtagctgtgcaaagaaactttggaaaggaaaaaaggcaaggttttgtacaaccaattcagtaaaatatggtaaactttgaagttgctcatgattatcctctctttcagagtctggaaagcttaaaagatgagacttagcactccgacgagttactaa

SEQ ID NO: 49725 - DNA, 551 bp, Arabidopsis thaliana
cgtctttttgagaatccccttggccagtacttaatatgtacaattggcccacatcatctgaaagtataattgaagttccatccctacattatgaagatacagattagcaatctgatggagtaggagcataaggagtacagcccaaaacctatttgcttacggtgaaaacttcccatcaaccaacttgtagtgtgaaatgtcgtatatttgtataggtatgccttcccatatctagaggaagagaacaagtgctttagtaatatagatgctgaagaagaagggtttagacagtgaggaaggtaaaacttacatcccacactattgtttttccatcatagccagcactcatagctatacgaggattgaatggatggacgtccataacatatgtctacaatcaaaaagtaacatgttgataacggtaatacaaggaacaaagaggaaatcatatctggaacactaaaacagaaaccagactaactttactagtcatactttacagactataacaaggcataaatgacattaagtagagttgggacttgggagtg

SEQ ID NO: 49726 - DNA, 634 bp, Arabidopsis thaliana
taattacatacattttgttggatattatataacttacatgagctcttatacaatgttaaggtttataactataaactatatatcggcttttcaatgatgttcaatacctgtaatctgaaggattgttaggccaatatctatagttgatggacgatggtggccagatattgtgaatcagatgatcgtcccaagcctttagtttttttggatccttggaaaagaaaccttcgatgtcttgggagtcggctggccttgtgacagattctttttcggaagccgggagctcgaaaaactgcctccccacttcttgcagccgccgcatcaattcggcaggaatgccgtggttaaccaactgaaaaatcccccactcttcgctcgctttcaccactgcatgagccacgagctcgtcgcttggatcgcttagatcaacgatagggatcttcttggttaggagacacggtggagatatgtgttggtctctttcgacgttcatagttgttcactctctcttctccaatatttgatttttttagacgttgatcagttggagatgtttaaatagaggaattgtaatgatcacgtggtgtaattcgtatatgttacatgaatatgagaattttcatttctgtttttt

SEQ ID NO: 49727 - DNA, 554 bp, Arabidopsis thaliana
tgtgagtaaaaaatcccgaatccgacccaaacccgaaaatattttggatatttttggttatttttatatttttactaaaataactaaaccgacccgaatctgaaccaaatttttagaatacccgaatagttctcaacctcctatccgaatagacccgatacccgaaaaaaaagaaccgatcccgaacgcccacgcctaattttgaggatcaaggtgatgttgatagaagaggtcggaaagttctaagtatgaagcaaaaaaatgatataacagaaatctgtaacatgccacgactatgataatagattagtaaatttacttaagacatattaaaatcaactaagagaggcccgacatgaggaaagtcaggattgacgataaactaaaatagaaatagagaaaccagaagtcacttaagagtctcatagaaagatttgatggccgggtgtgccttctgagctttcatcgtcctcgcgctcagctccggccgggaacctctcttaacagatatctgcgcttcttagcgattttttccattgttggtgcatacatat

SEQ ID NO: 49728 - DNA, 522 bp, Arabidopsis thaliana columbia
cattcagagcctcttccctaccaggtgggaaagtgaactttcattcactcatctctttcacggctccatccttcatctgcccccacgcccattaaatactgcttggggtactgaggcagaaggaagggaaattcaatgatgtggctatgcgcagacctagtttcctggtcagaagccagcagttatgacacctgggctctggtccttgacttctctgagtggccctatgacccacagcaggtcactgtccttccaggtcccttggtttctttaactgaagtgctacactttctattggcagtacacccttccttcaaacaaaatcttacataaaacacagagtcaagcccctcgtggtacggaggagcacaagttcaagacctgcctgggctacagagcaaacctaggcgacctaacaatatcatgtctcaaaataaaggatggctgagatggctcatgaaggtgcttgaagcccaccgggagacctgggtttggtttttttgcccacatggtagaaggtga

SEQ ID NO: 49729 - DNA, 609 bp, Arabidopsis thaliana columbia
cctaactaattttaatttaaaactttaatacacaattgttttaattgaaaaataaaaacccaaaataagaaatcgatgtatgaaaaaacatgatttttatctgagtagttgaataagatgtgtaaattaataaacgttaattttgctaacgaaatttctaaaccgaggttaatggttaaccaaacgtggttaatttggttttgcgaaagactaaaatatcctcgttcgttttccccaaatactagtttacaatcgtgaaagcttacaaccttaatttcaattatattatttacgatggttagtcatagctctgagtctaatgcaaattcggcgagcaggaattggggtcctctttgcaattgtggtagagctacgacggttgtgaaagcgtggactaacgaaaatcctggaaaaagatttttcagatgtggtgctcatgggttctttgattgggcagatgttgagaaggcatatagttggcagaaagtgagcttattagaagccaggatgagattccgtcacagaaagaggaaatcaaggcacttaaagaacctcttaaggccatgagttgccagatttgagtggtcgacactatgacccgtggtggtg

SEQ ID NO: 49730 - DNA, 509 bp, Arabidopsis thaliana
cggccaatgactcgaccgatctgtgaccacccggactcagaggagcgggctcgggagctggagctttgaggtcgtctttcagctcagccataaacgattaagatttacctcagcatcagcgaaatcttttaaccactcatcaacttgctccttctcactctccagaactctgccaccttcgagggcctcgatcagctgcgcgttggcttgcgcctgagacaagtacatgaatcggtcattgacctcatcaaggagcgacactttgtgctcggcggtcttcatttgggcaataaaggtctcggagacctcccgcctcgtcgtctggacggctcgagccacgtcgctgtcacgaagtcccctctcctcggataacatccgcttaagacggacgatctcagagtccgccttgagattctgctcggccatcttaatggcgttctccttattcacatgggccgtcctctcgatctcttccttttccagcttcgctgcagcagcttcggagagtg

SEQ ID NO: 49731 - DNA, 553 bp, Arabidopsis thaliana
gaaagaaagcgacaatttttcaggtctaggttggctttgtacttcatttaatggagggacgtcaacaatgggagctgctaatctacgtagaagtctttctcctctccataccgaagtcgaagctttactctgggcaatgaagtgtatgattggtgccgacaaccaaaaagtagtttttttaacagactgttcagacctggtgaagatggtgtcttctccaaccgaatgaccagcattttcagcatatttggaggagtttcagagcgacaaggaagagttcacttctttttctttatctttaatttttcgtaatgcaaatgtcaaggcggatactttggcacgaaaagttcgtgctgaaccgcttcatatcacttatgtaaacaacttccctctagattggcttgtttgagtgctaaataatatatgttgacaaaaaaaagagactttgttgatacatgtcttgaaccgagagtacgggatccatgaggaaacaaccatgtcataatgtgagggccgcagtggtgatctgagtcatcacgagggagcttgaaga

SEQ ID NO: 49732 - DNA, 412 bp, Arabidopsis thaliana columbia
aatttgagacttttgattttctctcaattaattttgctgatttttaatttaattaatgttaaatgacacatgttatttttttgtgtgctgatgtgtcacttatatgtagagagtttgtcaactttgatatatatgattacaaatgtactcattggcatgatgaactatgaactatccatcggcttccactattcggcagaaaataagcccaagccccatattaagtagcccctctctcttttcaattatatcctattgggggaaaagccaacaatatgggtcgcaaagcgggtcaaatatatccgactgaaatctggatccgttggtgaatcgtgaatcatcctcttcctcaatgcgagtggacaaagtgatctagcagagagaatgaatgaacacgtcttgccattagagg

SEQ ID NO: 49733 - DNA, 595 bp, Arabidopsis thaliana
taccctttctttaataaataatcgattaaacgattataccacatacgtccggattgtttcaatccataaagtgatcattttaatttgaccgcatatatatctttagactttgatgagtctaatgcctcggaaacttttaatccttccgggattttcgtatatatatcattatcaagagatccatataaataagtcgtcactacattcataaggtacatatctaaaatattagaagccgaaagcgtcattaagtatctgaatataattgcatccatgaccggagaaaatgtttcttcataatcaactcctggtctttgagagaaaccttttgcaacaagtcgggctttatatcgtgtgatctcatctttctcatttcatttcttcacgaatacccacttgtgcccaacaagttttatattctcagatgcagtaacaataggtccaaagacatttcttttatttaaggagtgtaactcaacttgcatggcatttttccatttctcccaatccagcatttttctggcactcggataatgtctttggatccggatcatcattctcatgatcgatctgtttagagaaagaaaaggagaat

SEQ ID NO: 49734 - DNA, 398 bp, Arabidopsis thaliana columbia
ctgtcctaactctttcgctatcaacaaataacatagtaaacaaggaagaaacgaaggtttcattcgcgacctggcgataccacaagcccagctcccaaaatctggcaggtcccttgtgtgacctcacttcaacaggttctcgagacaaaacaactcaaactcactcaaagttttaaccttcaaagaacataccatatcacatccgacataacttggactcgaaacaagtccaattattatccggaacatggacaaagcgaggtgatcatacaccaaaatcaacgaagtgtcaaccctcgaacgacagataaaacatacttgctaaaaaggataaaagccttcccaggcatccaagtgcttaaacgaaccaaagataaaacgcttcccaggcaccaagt

SEQ ID NO: 49735 - DNA, 511 bp, Arabidopsis thaliana
catatctaacttctccacctgtattgtccaaactagaggtagacgaaaaaccttatctatatgtctcagtttcggaccatgcggttagcggagtcttaatccgagaagaccggggagagcaaaaaccaatttattacataagtaaatccatgatggatcctgagaccaggtatgcgatgatggagaagcttgcacttgcagtagtaacctcagctcggaagcttcgtccatattttcaattccatccaatcgaagtgttatcaaatcaaccacttcggacgattctccatagcccgaaccagtccggtagattggcgaaatgggcggtggagttaagtgagtatgatatagagtacaagaacaaagtcgccatgaaagcttaagtcctagccgattttttaacagaattaccggtactcggagggcaggagcagccgcaaaatcagacttggaagctgcatgttgattgatcatcatcaaaaaatggattccgggtgggaatcaaattaga

SEQ ID NO: 49736 - DNA, 599 bp, Arabidopsis thaliana
cattgttgaattgtctgaggtccaaacatcctaacattcagttgagtatcagttctcaaacctgccaagtaaacactaaccaagtaatcttcagcgaagttcaatctagtgctaatcaactcaaatcgagcatgatactcctctattccttcagtctcctgcaactgtgtcagttttgcaatcgagtcattaacatgctcatcatatctcacttgcaacaacagtttgtaactccaccaatcatgcctaacatgcttccaccacatcgattgtacaattgattggtgcaaagtcgcagcagtgtcatcgaaatggagtgaagcgaacgcaactttcaattcctccggagtacgatcaattaagaaaaattgttcaatctggaacaaccattctgtaattctatcaccattaaatctgagatgctcaagtctcgcaaaatcagatctctcttccaatggaaaatatttgttcgacataccgactctctctttgctggtgtcaggagtgacgatcggagctgtagatatcagctgtgaggatcttccaatgttgtaagctctcgtatccaacattgattctccgatgcacggtgaggattg

SEQ ID NO: 49737 - DNA, 594 bp, Arabidopsis thaliana columbia
tatgtatactaaaatgttgaaaacctagattcactagaagacaagagacttgaacggtttgggcgagtgctcgatcttggggatcgagtaaagagtgtgcggcaaagtctacgcctttctgtccatgctccgagtgatcaattggtcgagtagttgcttcttcctctcatattcttattcgcaatcaagatgtggatataagcaactaagtcaagccagattataatgatggtgggtttctagtaactatcctaggtcaggattcaaacaagtaaaaatgagagcttaagagccctactcgatcattgggtcgagtagaaccaacaggtgacgaattaaagtaactaaaatgcaatcaaaaggggatacaaataacaggtaaataaaagtgcaatcaacaaggaatacaaataaatctaatagaagttctaaggatggattcattgataagggcaactctagggttcattagatggctaataggtgaaaggtagatacccttgacgatagattcaaaaatcgggtcagtccactgtcgtgacagagaccccataactctacacttcctaatctcaactgtcgttgatgaacata

SEQ ID NO: 49738 - DNA, 910 bp, Arabidopsis thaliana
catcacattcacaaaattgaatctcacctactacacaagaaactggataatcttagctttataccgaagttctaaatcaatttcacaatgaagaatcaagtataaaccctagagttacaatgaatctcacctccgacgagaaaagcgtaaccaagagtcaacttctgcgacatagacagaggcgtgctcttcttcccgtcactctcctccttatcgtcttcccctccgtcgtcatttccatcgccgcctccaccaccgccgccaaatttatcacctccaattccaccaccacctccgtaatcgatcgtaggctcgacttcaacagctttgactcccgaatcaacgcagttagcagtaatcgtactggtgatcgtcttagtggagtcagagggaactactgcaccgagaggaagtcgtcggtgaccagatgcgaacgccagaggatgaaaaccgttggaattttggaatctgacacttcggatcggtgaagcagtggaggtattgagtagatagtgattaggtctgacgtgaaggagagaggattgtgcagaggaggaactcaaaatcaaatccgccattttcttcgtcttcttcttcgcaagctttttgtttaacgactaattttagtgattgattgattttggagaaaatcaacaacaaaaaacgttaatcaaataatgaaccttaaccggctaaattggtcttatctgcaaacaggttttcattagatcttactttattaggcattgcaatcggtacttcggtccgggtcagttcggaattcgggtttgtttgattaataaaaaatctaaccaaattaaccgaatttgaactacggtttcctcagttctgaagtgatatatttcggttctgaagtgttctgaattgaaacaacaataattaatacggt

SEQ ID NO: 49739 - DNA, 1362 bp, Arabidopsis thaliana
ctcactatgttccaaccactcttacggtgcttacttcatcctcattcccctggaaaatcctagccagcccaaagtcggatatcttcgggtttagattctcatctaacaaaatattgcttgcttttagatctctgtgtatgatcttcagccttgaatctctgtgaaggtacataagacctctgcaaatcccatcgattatgttaaaccgcgtcttccagtcaagaagtctttgcttcaccgggtctggattacacagcaacaaggtgcacaaacaagactagcattaggttctgttcatgtgcctactaagactgtaacagagttaaaccaaacgataagttcactaccaaatagatatgcgtctaaacaattctctggcatgaactcatagaccaacatcctctcttctccttcaatgcagaaaccaagcaatctcacgagattccggtgttgcagctttgagatcacgaccacttcattcacaaactcctcgactccttgtcccgatgttcgcgaaagctcttcacagcgatatcgagcccttcttgtaacctcccctgtaaatgaaagtagagcaacttaacactccattgtcactttgaaattcctcctaccaatgaaacaaagaattgtttaagaaccttgtaaacagcaccaaatcctccttgtccgagcttgtttgtgatagaaaaattgttggtcgccactgctaacacttggaactcgaacagtggtagctctttaagcttgtattgattcacaaggattgcaccaacgtcattactacttaaagcttccattctctcattaagtagccttgtgtttctgttcttctctgttaaacaaagcaatgcaaaaagttagttatctaataatataaaatcatagagagatatctcttatatagttggaatgtaacgctaacctctatgcttagcgatcttccacagtgctaagacaacagtccctgcaaacaaaaaagcgcctactagcaaagttactgtgatcacaattgaccgattggtccgcttttctacaaaagatttggtgcaaatctgttatgatctagtaaactaagttggatggaaaaatgaggttgatactacacttactaaactctgaatctgcaagacgaatgtaaaaaaccacgccagtgccagaaaactcctgcatatccatcaagtttccgctccaaagaagacaaccaatccctctgtcgaatgagtaagccgtacaagaacagttcttcagacagctctcaggacagtcttgttcattggctccagatcgttgtggattgtggggcactttcatcttttgcactctcacaaatccatcactttttctacttccatcgttgtt

SEQ ID NO: 49740 - DNA, 814 bp, Arabidopsis thaliana columbia
cccagtaccactagaattactaactagtaactacgtatactactaaaaaaaccaagtgatttacaaaaaccgattattttttttatttcaactggcccaataatattttactcagccgacacatacatatgggctcttaatgggccatatgttaactatatcaacggttagggtttacatgaagcaattaagggttttaagttatgccgcctcataaccatctatataaatacagattctcttcggtctctcatatcatcagccacttttctagcttattcgacctaatggtttacacagatacatttagtatttcgattctctattatcgtgtttgattgtttttggttattcggtattatgtctcttcccgatgaagaagcaatcccatagataggaagtgccgtatgacactttacacaacaacggactgaacgacgatgcatccggtgaaatctcccaatccccgatcagtcaaacacgaactcgtatccggatccaaacccccggatccgtttacggtcgggtactgactcctcggccgggtcttcaccgtacttcccaccgttctgtgtccgttgtgtggttgatttgacaagggttcgctgagggtttttaatttttggtttaagaaaaattgtccgatgccacgtcgacggtagctttagggcaatgatcctcgatgctacattggacataaacaaatgtacgtgtttcgcttactgataggaacctgtggatcttgaattgatttacgatctacggagccatttcggcgattacatttttttgatttgttttattgggatgatta

SEQ ID NO: 49741 - DNA, 529 bp, Arabidopsis thaliana columbia
gatgttttaatgtatgattcatttataacattttgcgatttttcatgtgatttagagagaaaaaaacatttcacattgttaaacgttattttgttttctctgctttgaaaggtaaatagttgacctgaccggttatgaaatcaatgtacttcaaagaaagaaagaaaaaagagagagagctttggtggggcttgctagatttttcaaagtacaccagataaaatagcaatgatcacaaagaagttgtcacatagaaaaacgaagatacacaacagaaacaagaaacaaaagatacagaaacagaaaccaaaaacaccaacgatagaaggaaaaagaaacactagttcaggtttggaaggagcccggcataaaggttggagacgacaggaagatcaggtaaggtatattgatcggtgaaaaggccactctagattccctaacggagaagtcaccggaactggtggtggagtgttctgaaaattgggcaaatctacactcattaacggtaaagtctctggaaccaatggtg

SEQ ID NO: 49742 - DNA, 654 bp, Arabidopsis thaliana columbia
acgttgagtttttgttgtaaccattcatcgtggcagttttagctgtctcgacaacagaagacaatggacagctttgaaacttaatgaactaattcacatatttttgttccgtgataaaattcaaatcgttttttgaatatatatgaagtgcatgaagctttgattcaaacgaaaactataaaatatgtataatgtatatagactattccttaaattaaatattcaccacaaactgattagaaatatatgtattgtttttttttacgtcggtgtggttactactataaaacattatacatgctagctcatgccggcacctaccccagcaaaaaacgccattcaacgttgtcgttattatagacttttggtttttaattagttttgaagaattattaattcatgaatgatcaacttaattgtatatttatacccaaatagtgttacaataacgtctattgttgagaaggaaaaaaaaaaaaagtgtatagttaatgtgtgtgacaggaggagactgatagcagctgtgacagcattggccgccgttgaagatgtgtcccgtgacggtgacagagctaacgtcaaaggacgttcgggacctacaataattaagccctaacttagattaattatctcaactcttttaacactaatcag

SEQ ID NO: 49743 - DNA, 490 bp, Arabidopsis thaliana
gacatattaaagaaattacaatgaccatctgttctatcaaactaaagaagagtttttttctttaatctctcaaagtttatgaagatccaatagagaacaaacaaaaaataaaacaagttgaagctgaacaggactctagccacatccattcttataacagacttagatacgaatgatcagtaaataactcctatcatccaaccaaactgtatcttttggttggagtaattagagatcttacttgatttaatttagaagaatgataatttagagaggcacagggtaacggttgatgcaatccacccaaggattgttcctggttggcttcttcaccttcctcattgccttccacaccacactgttacacttaaaaccagaaccgaaagcgatctgccaaaccctatcgcctctacgaacactttccttggcctccatgtaagccaactcataccagattccactgctagaagtgtttcaaacctgtgaagtg

SEQ ID NO: 49744 - DNA, 554 bp, Arabidopsis thaliana
gggtttgtgcaagtatttgtcttttagtaagctaagagtgaaagcagatttgaagcaaggagacttgttgaactcgtctaaccttgtttgcgcaattgggtttgatcgtgatggagagtttttcgccacggcaggcgtcaacaaaaagatcaagatattcgaatgcgagtcgataataaaagatggccgggacattcattaccctgttgtggaacttgctagccggtctaagcttagtggtatatgttggaacagttacattaagagccaagtcgcatcaagtaactttgaaggcgtggttcaagtaagttcagaagaaaactctcaaccttattaatcaatgaaaagtatgaaaaaaaatcttataactaaggctaatattttcataggtttgggatgttgcaagaaaccagttggttacagagatgaaggagcatgagaagcgtgtatggtccatcgattattcatcagcagatccaacattgttagctagtggtagtgatgatggttcggttaagctctggagtatcaatcaggcaaacttcgaaactaaa

SEQ ID NO: 49745 - DNA, 1127 bp, Arabidopsis thaliana
cttctcctccttctttagtgatacccaaatatagacctagcacatgcttcataatcggatgaatcttatttccatagataatcgacgatttttgcagattaatttcctgccctggacatcccaatagagcttcaagcattttaaaatttttgtaccttccctgaaagtagctcggctcataaacaggctatcatctgctaaaagcaaatgctgaatcgaaggacatcttcttgtgaggcacaaatcggaaatacgaccttcagattcaacatttctcatgatgtgaacaagagcctccgcaaataggagaaaaaggaatggcgaaagggggtcaccttagcgtagaccccgttctggtttaataaaaccataagaattcccattcagcagcaccgagtatgtaaccaatgtcacacatataattatccaagcaacccatttcctatgaaatccaagacgtgtgaacatcacttccaaaaaattccactccacacggtcatatgctttggatatatcagttttgatcgccataaaatcttcattacacgcaggattagtatttaacgcatgtatcatttcatgtgccaaaagcatattatctgatattaatcttcccgccacaaaggcaccttgcgtatctcacacaatctccggaagtatagcctttagcctgaaacacagaatctttgaaattatcttataagatacggaacataagcttcttggtcgaagggaaagaaccagactcaaaaaaatccttcatctcttcacaaacttgctgccccacaactgaccaatacgactaaaaaaataggtccgtcatgccatcagcgcctgatgtactgtttcttcattcgtgacccgttttgttgaggttgcattcagctcagcagcatgcccgtctctgacccagggcagcatggtcaaatgcctaaggtccaaaataaaaaaggtccaaatttttttttttgttgtaagatttgggaaaaaaaaattagaacaaataggctcattataaaaaaacgtttaagaacaaaaggcccaaaaaaagttaacctacttaattagtaagagaggaaatcaaaacgtcgttggtttttgtgcgcactctcagattatgatcaaaa

SEQ ID NO: 49746 - DNA, 563 bp, Arabidopsis thaliana
tccccaacattgactttgatcctcctctatcaatcttagtcaatgtccttgcgcctttccaagaggagccgagcatggggagtgagtcacaagaagaaggagatgagctcaaccaagctgaagctgagcaggaagaccatactcggccgagtaactttcagcaggccgagtacggtcaggccgagtatgaacaagctgagttcagtcgagctgaacagtttgatgagcaagaggactcgtgtgaagctgcagcggacgagtatttctttgaagattatgctaagtccgatcaagagcgagatcccggtcaagttcacaagaagctgggaatgctcaagggtctaggcaagtttcagagaaagttgatcagtggtttgaagaagaaggtgagaaagatgaagagggcaatgaacggcatggcggttcagattcaggagctgcaaagaaggcaaagatcgccaccacctccagctgagttcaggagatgcaactcgacgagtgtggcgcgcaaaggaacgttcgtttcgaccgccaagagcctcaaattacgagctcgggaggag

SEQ ID NO: 49747 - DNA, 581 bp, Arabidopsis thaliana columbia
gtgaagctctctttctctatgttttgctctcccgccaaaaacgttaacctgtaatttttccgccaaaaacgtaaacctgtaatttttccgccaaaaatataaatccgtaaaaagtggaatccgtaaatatcgtaagtttgatgataatgaattaataattattaataatgataattatttattattgttttataataataattaattaggttattacttaaatggattaacccatttaacaactcaacccatcaaattaaatgagttatgggttgacccaacctatttaacaaaatgagttgagtcaacccataactcatttaaccctaaactcatttgattatgagttgggttaccattttgagaccatatggttcatcataaatacttgtataataaaaacaaagtggttcacatgatcgattcatctgaagtatgatatttatggagagttcatacataaatactcgcataatagaacaaagtggttccaaaggtcatgcataattaaagtttttatttataaaagtcttatcaatgaactttaatagtaatagtagattgttgttgactagtagtaa

SEQ ID NO: 49748 - DNA, 449 bp, Arabidopsis thaliana columbia
ctagaccaacgatagacaattttatcaactctttattcggaaacaagtcgttttggatgttttatcaactataagccaaaccctgtatttcgcgatctaccgaacagatgctctatggggagtaagctgagcccaacatctcgctccccaaataatatggtgaatctgcctcacttattttttacatagcccgcaactccctcttcaaattatacataggtctactaggcataagccgagagacgtctcgcgcctagtacacaccgaatacttttatcataaaagccaagcttagtctcgcacttaacatctaactcggactttgacagagataattgagtatgacttctggtgaaaaccaatctactcaaaagccgatctcgaggattcgcaggaaacttataagtcatctaacaaacttaaatgtgaaagtcgataaattgatatta

SEQ ID NO: 49749 - DNA, 157 bp, Arabidopsis thaliana columbia
cttagtaatgcgtccttcaccttatttccatagagggaaatgtcttccgatgcttcaagactcggaaagacacaatcctgccaacctttgataggtggcgccctgcaatccgtgaacacttttaacttcacgctcactactcgtcccaggttagtct

SEQ ID NO: 49750 - DNA, 534 bp, Arabidopsis thaliana columbia
tatatttaattaggaaatgttttaaaaattatctgattggattattaatcttttagaatataataaatattataaatccgtattgatataggagtataattagttttccggtttgggtttagtgctaaaacccgataagttcaaaaccgaaaaaaccctcaaaaactcgcaattaacccgtgacccggtgaaccggttgaaccggccgggtgtgggttttaatttttttttttgattttgcagtaaaatatgggattttagactttattcaattatttttaaaagttttttcagttcttaaattcattcgatgttttagattttggtgaagactttacaataccgccttaaaaatgaatcgaatggtgagagagacaattgagattagttgtttgaattcacgatgttttattagtttatttctatcattggtgatctcctactatatttgttacggtgttagacatttagttggatttaaaatttttaatcactttattattattgtttgattatatatatatatatatatat

SEQ ID NO: 49751 - DNA, 555 bp, Arabidopsis thaliana columbia
caaatctgcactcaaccagacaagctgagcacaaggaagagaagaggagaagacgaagtgtttggaagcggcctggacctccatcggatcacgaagcccatctcgtcccattatcactctatgggccgggcgattaggttattggcccgtctactatcaatttatttcgttttgtataaatagatgtcttagggttctgtcctgagacatctagttgacattgagtttttgcttcagttttattttctgttttactctgctgcgccgcttttgcttctgcaacctgtaattcgagatttttccaagttattcagattccgcatctgatttcatgtgtcatcttgtttctctactctttatctctttacttatgcaatattatcatttatctgcgtttatgtctttgagcatgttgtctgagtagtgacatagagttcttaaggatgggatagagtagttgtggaatccgtattctgtagaatggttaagtttagaattgattgagtccctttaggaatagttgtgttactgcttattctttctgataactggaat

SEQ ID NO: 49752 - DNA, 571 bp, Arabidopsis thaliana columbia
ggaagaaagataattcttctgatagaagtctagagattgagattgtttggtctaatcagtcattttaattaatccataaagatgttccaattactgtaaaacaatgttttatgatatgtaaattttaaacttattaaggagttattataattgtgatggtgtcatgttttgggaagcttattgcaatctgaagaaacccatccgagttgttgcttctcgttgtcgtagatcatcattagcccttgcatagagatatcttcaaaacaagacaaaagaaacaaaaaattagtttcagacagaaacattaattagcgtttaagtgttgatgttgtttgtgtttggttgttacctccgattacgttggagttttgtaatcctacttcacttccatttagtagtccaagcatacgtttccagttttctgaacaagacaacaaaaatttcactagaatacttctttgaaagtgatgaatgagattttgggtgtgtcgatattcttacagagacaatgagatataattcgggtgcaagatagagctgagtgttcttctcccattggtgaagttgattg

SEQ ID NO: 49753 - DNA, 634 bp, Arabidopsis thaliana
actacctatgataaaacataaataaaatatcatgtggaagacaaattagactagaataggtaaaatggaaaccaaagaggcaaaaacactagaatagataaacttaaattattattttttatggtcaataggtgaaattaatttagtaaacgaaattaactagtaaaaataaattttaaaggaaataattaaattgagtttgactaaaaataggacttaccaaatagagagtgaatcaagagcaagttcaggattctcgagaagtccggcaagaagaacgagaatctgaaaataccaagtctcaaggcaaagcatcacggcagaagcggcggagagtttaaagaaactccacaaacccgagaaagcttgaacactaaaacctctccacgtctcacgacacctctcactcgtcacaatataaacaaactgagccacgactataatccaccacgacaagctaagcacaagcgacgcaccaagaagtcccataccaagcttgtaaaccgcgagccaacttaaaagaaggtgaacaaagagcgtcgcgttgagatataagcacttggagctactatgctttgtgattggagaaatttttgtattggaaagttcgctgcgtaggcaaagatttgaggga

SEQ ID NO: 49754 - DNA, 493 bp, Arabidopsis thaliana
cgagaaaaataaaagaaaaacgaaaaataaaagaaaaagaaaaagaaaaagaaaaagaaaaccataccagtgggtttcctcccactaagcgcttgtttagagtcaatagcttgactttggtggagtttggggatcaggtggatcagaaggtggtagtaaatatcgcagagaaagacctctcatcatccatgctggcgtataagaagttaacgcatgaggtctatctaggaagagaggagtatcagcagggtgggactcatgtatggatggaatactccttttacctccacaatcatcaaaagaacaaacaagcgctcgacgagaaactcgtggcttgctaaaccgtgaaacagtttttggaaattttaaactcttattgatgaaatcaggagttttaggaggaggaaataggttcttagccgttatgaggtgatccaggagtgacggtgcagtgggtgacgtgacagtaatgcctggagtatcagcagtgaac

SEQ ID NO: 49755 - DNA, 773 bp, Arabidopsis thaliana columbia
ccccagatgatgaatctgacaacaaacatacccttaacccttctaagaggactacctctgaaccctctttggctgatatgacaaacccttttggtggtgagagagttcagaaaggagatagtagttcatccaaacagtcattgttttcgaactccaaataccagtacaagaacaatttccgtgattctggtggtattgaaaaccagtcggttcaggagcttgaaggttatgctgtgtacaaggctgaagagactacgaaatctgtacaaggttgtttgaaggtagcagaagatataaggtctgatgctaccagaactttggtcatgttacacgatcagggcgagcaaatcactaggacgcaccataaagccgttgaaatcgaccatgatctcagtcgtgtgagtttttcttccttctggttcttgattataaaatggaaacattcaatctttttctgaggacattagttggtgtgagataagaagacggtagacatttgatgctgaaactagttggatttttggttttcagggtgagaaacttcttggaagccttggaggcatgttttcaaagacttggaaaccaaagaagactcgtcctataaatggtcccgtcgtaaccagaggtttgcttcttggtcattgatatctcaattcttctcgcagctattttactttcacctaattgctgaatcctttattttgtgtttttgcttagatgactcaccaacgagaagagttaaccacttagagaaaagggaaaaactgggactg

SEQ ID NO: 49756 - DNA, 477 bp, Arabidopsis thaliana
cttcttgaatcataatgtcctcagtattgagagtcaaatgacttggtggagactcatcttcttggtggatggtgatagcattagcagtagcatagtccttagggttcttgactgctttccgtagaagttgttgaggatgcttcggagcagaggttgaggcaaattgacttctccacatactttgattttttgagttcagagcttcaaacttgacattcaaatcgttgtatgaacaatcgatcttgttgtggaattcagctatcttcttttcaaaagccatagctccagtagcttgtccttggatgatctgttgaatgagttgcttaatttcaggatcttaagctgctggggcttgttgtggttgttgagtgaacctggtggtggattctgctgttggaagcctccattaaattgttgtttcgagtctacatatctctgaaattagtaggtcagacatccatttgaacgtcttttgga

SEQ ID NO: 49757 - DNA, 522 bp, Arabidopsis thaliana columbia
cttatctccattgttgtcccattgaattgaatacctgaaaagacactaaaaatactcgagaaataacttaaagactcaaaatcctatacgtaaaacatagataaaattggtgaaaatcgggttatatcaactcccccagacttagcttttgcttgccctcaagcaaaacacaaaagccgaacccgtggaagaggttttgaaaacaaaggaactcccaacattctctagcctattaccatgatcattcaaactaagtccatatgcctaacaagtctaatcaaatcctaaccaacatgtacttctctgcaagcttacacaacattctagattccatacctaagttccacaactatatccaccaggctttcatcgctgggtctcatcaaacaagccaccattcaagatccttctagactcattcatgtactataccatgataaattaaccattctttatatatttttttctttttcagtgttctttctctcacctgacttattcttttttgagagtaacaaaggg

SEQ ID NO: 49758 - DNA, 497 bp, Arabidopsis thaliana
  unsure (1)..(497): unsure at all n locations
ccagaaggtgaaaaccattcttaagccaatgcganggatgcgactccagcatagccatttatcgagcgatgtcagaccttcgttcatcatagtaccttagcatctcgcggtattccttatgcctagactcgacgcatgacaagaaaccctcggcttcacgtctttcctccgagctcgcctgacaagaactcgaaggttattaaagaacgacatccctcgttcaattacctcagcgttcgagaaagtcggaatagaaggaagaaagggccgatgaaacaattgtcgatcaacagagaactatttataggggcaaatatagaaatcgaattgggaatttgcctaaatgcgatctggcaattctcattttccttttccaagacattaatgtttccattttctccaaaactgggaaaatgggaatttacttaattacgggttgacttcctccaatttctttttcaaaaaatgacaaagctcataaatggaaaaaagaacta

SEQ ID NO: 49759 - DNA, 901 bp, Arabidopsis thaliana columbia
tctgcggatttgcccagaaaggtcacgactttgttgatgattaagtcatcacgaagaagatcacgagtaatcaattgagtctgtatctgtttgaaaacgcgaagagagctgcatcggctgatcaattccagaagaactgatttctccggcaaatacatctagtcgcaaatagtgatcaaacaatcacatgggggttctatgttaatctgcatttgtagaacgagttcgattcacagaaagaaccaaatttgcagattcatagacggagaagaagcggaagactgaaacagagagctaacctgaggatgacgaagagggtttaccgttaaaaccacttattgggcctattattgggcctatctttttaacagattgggcttttctataaaattcttagacctctctagactctaggcttcaccggagaaagaagagaaatcaatcggattagttgcagaagtgcaatgcattgcggatgtgtattcgcttcacaaactgtgtcatcacttctcccatttgaaattaaaacctatgcgtcaaagcttcgagcttcgtcagcccaattaccgagaacccagattcagataaacccttcagatgatctctctatctacggttcagataaatctccggcgaatagagtttcgttgccgtctcatgtaaattctatcaccagtactacaaacccttttgtcaaacactgcttgaagtccgccaaagttcctcgtatcgccacgctcatggctctgttcttgtcgtcggaactatccccatcaggtatgtatcagtgatcttgtactctttattttttttcattgctactgagagaattgtggaaagtagtttccttttttactgtgttcgattgatttcatgtgaaattgagtttcaaggagatggg

SEQ ID NO: 49760 - DNA, 857 bp, Arabidopsis thaliana
  unsure (1)..(857): unsure at all n locations
gacctgtttcgcttcggggtaacccggcgacacaagcgggtttattgttgggtatgttaccgtggaatggatatactttggttgaagagaatggaaccctccgtcttggctggaaggatctctcgcttttgactgcctctgcctggaaatctcagccgttcgattgattttatttttattttataatgcaaactgcaaagtgatcattaagattttttgttttgaaaatatttccaaacaaattacgataattacgataaaaaaaagtcttcattgacgcaaaaagttgttgatattgagaatgagaaggttgttgatactaaaaatgagaaggttcatgttagataactatatgcataagagaggttcttgttagataactatatgcataagagaggttcatgttaaataactcaataagcataagaggttatgactatacacatatctgttaataaagtcagctacaacaaatagaaggtctaatatcatagacgataccaccatgaaaaatcatcatttctcatagtattcatgaaaaacatcaagtggaatttttatgagaccatcaacttcttacatttagtgaaactggtttttaatttgttccttcaattcttaaatcaaatctagaattcatacaacttgagattcttagaaaattcaggatacttgtctcttttttcttctttttttgtacaattttaaaagaaagatgtagtgcaaaagccaaaaatcgaaaacaaaaaccaaaaactaacaaaataaaaataaaatgacaaccattcttttttttgggggggggnggtgaggaggggagggggggaaagaagaaagaatgacccaactgtatgaag

SEQ ID NO: 49761 - DNA, 946 bp, Arabidopsis thaliana
cgaatctcctaaataactcaacagtgtgggtgtaaagattgaattcgagtagtggaaacggtttatgcatttgatttaattgtttataatgcctagtttatgagtaaaagttataggtccgtcttatgatgatgaacttacacacataagatgtatttgttccctattcatgacctagtagtgctggtgtaaagcgtgtaaacattgtgcatattcttgactttgatggtcctagagagacaacgaacaatgaaaatgagacatggacgcatatcgggcatatgaaatcattaacacatttgcatatgttatgtcactacatcaaaaaagttatcagagagagggaattgcttgccttggtgtcataaaacttgaggaagaatcgagacttgggcaccgatagcttagtctcaagaatggcggaaacagcagcgcttagcttcttgttcacatccgcattaaggccaccgatagaaactaattcaccataagctgcaggatcctcggtcccgccaaatgacataggcactgagccattcaagacaatcatcacatactgcaaattaccacaatgaacaatgcaatcagatagtgacctaagatgcaagattacaggagtatcatgtttcatgaacactatcatgaacaagcaatcgtcaaagcagaccctcattgcatttgagaacaaacctcagcaatgccgagttcaagggccagggatggcacagagatcgtggtggacttaatcagaagaacgccaacgaagagcgtccaattaagtccagacgcgactccggaaatgtgaaccacgagaacagaacggagcaacgagataaagtcgcgcagggcttctatatcatgcatgtgcagtaactacgctcggctcgcctggattgcatacggagcagaaaatgatgaagacgatacgacgcactctaggcaggtc

SEQ ID NO: 49762 - DNA, 720 bp, Arabidopsis thaliana columbia
cgactctagctaaccattcttctacatagatcatcgatcttccctgaaagagcttgatacctcttagcctgttttttcaacaaagacggaactttcgatatgtcactaggacgacaaactttctcaagattcagtaattcctcttcaagcaacctcagtttcgcagatacacccgtcccttcactatcaatcttccatggtgattcccttctatgcaatcaaagacaagctattatacatcactcatcatcacaatcacaatcacacattctcaattcaaaaactctctattaccttggcacaaaatgcttcatacgatacacagattccaaagattcatattgtaaatcctacaaaaacagaagcaaaacttgaaaaaccaaacacacaaattcttcactctcataattaagaaaatcaaaatcaaaacctggaaaggattaaaattgccataagcattaggtgatggtgatgaagatagagtgagatgatccacagcataacgttcactggactcatctccttgtccatcatcatcatcttcttcctcaatctctcttcgagacataaacccaatcatttcatctctctcactcacttccctctccaattcactaatcctattcatgaaatcttctctttcttcttcaatttcatgaatccgattcaacaatcgtttctcttcttcttgccaagcgtttctatgactagcaaagatct

SEQ ID NO: 49763 - DNA, 550 bp, Arabidopsis thaliana
gagttctataagtgagtagtctcttcatgactctctctgttccaacctctgcaatctcagcttctacatctccaaattcctacactcaaccatctaacctaataactaactttaccttcaagtaattatctacaagactataaagaacaaacctgaaacctgcagatatagtaatcatcgccgtagaaagcacgcatgcgatcaacgggcttcactgatggatcggttggccggaaagagaacggaacactgaggttgaccagagctttgactctatctggtcggaagagacataaataccaagcgatgagagctccccaatcatgtccaaccacaaagaccttctcatcctctgaggcggttaaggcggatatgacggcgattaagtcccaacgatgttgaagcatgtgtaggaagagatctcagcgggacgatcggagtcaccgtaaccacgtaggtcaggagcgacggcacggtagccacgagcggcgagtccagggatctggtggcgccatgagtaccaaagctcagggaaaccatggaggaggag

SEQ ID NO: 49764 - DNA, 549 bp, Arabidopsis thaliana
taactaacttttccttcaagtaattagctacaagcctacaagagtataaagaacaaacctgaaacctgcagacatagtaatcattgccgtatacagcacgcatgcgatcaacgggcttcaccgatggatcggttggccagaaagacaacggaacactaaggttaaccaaagctttgactttatctggtctaaaaagacaaaggtaccaagcgatgagagctccccaatcatgtccaaccacaaacaccttcttatcctccttgattaaggtggatatgacggcgtactaagtcacctactatgttaaagcatgtaaaggaagaaatctcagccggagcatcggagtcaccgtaaccacgtaggtcaggagcgacggcacggtagccacgagcggcgagtccggagatctggtggcgccatgagtaccaaagctcagggaaaccatggaggaggaggactatagtaccatcggagggaccttggattgctacgtggatgtctatgccgtccctcttacattcatgtgctcattgtaattactttgtgtgg

SEQ ID NO: 49765 - DNA, 871 bp, Arabidopsis thaliana
tctggaaatgtggaaagtactaacctctgtgctaagaccagtatctacccattgtctggtaacagtagtaactcgctgtaatgttttaccttttgaattttggtagctgcaatcatatatttcagatcaaatttctattatttggatgaatatacccaaacccagaattgcatgaagagcataccttgtcataaattgtaaatatagttggttatttacacctccaggagcacttgattgatcactagaagaaagatcaaagaagactgtcaaacaagtccttttatcgaggccacacatcttccattgtgtagtattcccctccccaataactgtatcagcaacgctagggcctttctgcaatttttccaaaaaagagaggcataactgttaagctatctatcattatttgaaaacaagaagatcaacttctgagtatgggtagcttcaaccttttgcaaagacgcacaaggtccaataatcccttggatttttatgtcctttgaacagcagatctcaagtgtaccactgaaatggtagtatgaaaaagagtgagaatgcgactaactgaagatgtcttagatgcaacataagacacttggaaaatttaatttagcatgcatggacaattgaaatagcacgaagcacatcaggctatagcaacaactcacttgaaacaaaggccgagagactcttcgccatcttcaaatactcgcttaaaagaatccttaaatacagaatggccaaaactttctgataagacaacaagacctccagttctttcaaccgcagctttcatttcagcaacaccaacctaacattcaaatcacagataacataattatgatccaagttaaagtagagtcaacag

SEQ ID NO: 49766 - DNA, 600 bp, Arabidopsis thaliana
  unsure (1)..(600): unsure at all n locations
ccgactgacgaagaactcgtaaactattatctgaaaagaaagatcaacggtcaagaaatcgagcttgatataattcccgaggttgatctctacaaatgcgagccatgggacctcgcaggtatgtatgttttacatttttattacattgttcaacaactatatataattccttgttcttggcgaatagtcttatcgccgcgctatattgatatgaactgatttttagttgttgtgatcgataaataaaactgtagagaagtcgtttctaccaagtagagatccggagtggtatttttttgggccacgtgaccggaagtatccgaacgggtttaggacgaaccgagcaacgagacgtgggtactggaaatcgaccggcaaagatcggagagtgacaagtcaaagcagagcgnttgggatgaaaaagactttggtttattataaaggaagagctcctcaagggatccgtacggattgggttatgcatgagtatcgtctcgatgataaggattgtgacgatcctcttcgctccaggtaactgatcgttctttcatcactcgatatctatttaccaaatgatagtaattagtaaatatatagtta

SEQ ID NO: 49767 - DNA, 432 bp, Arabidopsis thaliana columbia
tcatttttttcgtaaatatgagaagagattaggttttacattcatagaccgaattcattaaagacaaacaatatagttaaaaggataagacttcacttatatagaattgtagatgggatgcaaacaagaattcacataacaaaaaactgcagaaacacaagtttaaaggatcttattccccggtgccctcccatccaaaatctatttcttatatccctctgttataataaatttattttttgtcttttcttttaatccaaaaattaggtaaagaccataaaactttgacgatttctgatatttaccaacccaaccagttataattagggttactacccaaacatttgggttaccattctaactggatatccactgttttaacaatgtctgaacaaaagaaaaaacttctttcctccgcgcggagcttaccga

SEQ ID NO: 49768 - DNA, 573 bp, Arabidopsis thaliana
cattagcatctcataaaacgaatacaaaaaataactaagaaattttagtaaaaagatggaatcgtttcatcctcttacactgttgaaaccgcctattacaggatggtgtattcgtgtgagagttgtgaggacattcttagttccgctggttccatcttcaaaggttatgggtttgattctcgtcgaccaacatataagttttgactattttgtaatgaaaattttaggtttgcatgttttagagttttgattagtatatttgatccgtagggtatgactattgaagctactattggatacaagatgtcggatcactataaagattttattaatgaaggagaatgggtaaccataacaagttttggaattgttgagaactcgggtcctgtcaggccaacaactcataccttcaaaattggatttgctgttgacactgttgtcagattaacaagtccggtacccgctattcctcactatcgtctagcatccttctcttcgattatcgatgatgaaatcgataaatgtgttttagttggtgagattcttatgaatttgttgtgtgcattattttat

SEQ ID NO: 49769 - DNA, 487 bp, Arabidopsis thaliana columbia
atgagttggttcattcagttcacattgcattctaacgtaaactttcgcaggctagaaatacaatactcaatttatattcattcaggcaatctatcgaacactttaaatgcatagaaaaacctaagttctaaagcagggtgatcaatcctattctagcattaagaacacacaaattgaagaacataaagattgaggattccttataatagtttagttactaattcattgacttcctacttagaaccctaaaacccaattgaaagattactcacacgttgcaataaaaatcaagcatagagatattaaagagaacataattcagattaagtaaataagaataaggtttagaaatcttctccaaattgtcaagaatgatgaatctttaatccccaaaggtgcttatagaaaggttctccaaaatgttacacaaaagaagcgtaaaagaaaacgtagcaatgaaattaggtctctagttttaaatcccgat

SEQ ID NO: 49770 - DNA, 560 bp, Arabidopsis thaliana
ctgcaagatcaaacgctctatatggaatcttcccccaagccctcctaagttaccggtcatcggaaacttacaccaagttggagaattgcctcacaggtcatttcgacgtctagccgaaagaaccggacatgttatgcttcttcacttagggtttgtccctgtaactgttatctcatcgagagaagcagctgaagaagttcttagaactcatgacctagactgttgcagcaggcctaaccttgtggggtctaggctaatctctcggggttttaaagatctcaattttactccatatggtgaagagtggaaggagcgacgtaggttcttggttggtgagcttttctgttctaaaaagcttcagtcttttatatatatcaaagaagtagaatgtaactttctggtcaagaaactgtcggaatcagcagtggatcaatctccagtcgatttgagcaaaacccttttctggctagctgcgagtatcctgtttagagttgcttttggacagagtttcccgagagtgagtttactgatacagacaagatcgatgaacttgtatttga

SEQ ID NO: 49771 - DNA, 630 bp, Arabidopsis thaliana
  unsure (1)..(630): unsure at all n locations
tgttgcaacatgcagaggaagtgtatacacccgaaatttttagcttgttccaaaaacaatacatagttattggtgattatgttgccaacaaggttagtaagtctgagatggtatatgaacataaagtatcttatcgtggtgtagcacaagagcatttggttaattatgatgttgcaaacgagacgatatgttgcagttgcatgaagtttagttttgccgggattttatgtcttcatgcattgaaaatgttggacaagaagaatgttagaagaatcccatctaactacattctaaatcgatggagtaaagaggcaaaagcacgaaaaatatcttattatcattcagagccacgtaatgaaacagtcaaagaatcgattggaaagcgatatagacatctatgtcgtactttccgtgatattgcatctgttgctgctgatcatatagaattgagatattgcatctgttgctgctgatcatatagaattgacgttgtgtcaaataaagaatctattaagttctcaaaaaattggaggaccganaaaagagcttctaaaatctagtgcatggattgttcaacttcagatgaagaanngagagagaagaagagaagaaagagaganacagagtgtc

SEQ ID NO: 49772 - DNA, 707 bp, Arabidopsis thaliana
gacgtaagtgacgatggtcggtggtgatgaatctatctcaccgtgtcggttcgagattccacacggcgagcctcgaggcttcgtcttcagctaataatcccttcgccgagggttccggcgagatgtctccgggaccatcaatcccgctccgccgagctgctctatttctagctgccatctccatctcctgcttcgtcctttacagagccgctgattccttgtctttctcccctcccattttcgatctctcttcttatctggttagtcttctcttctcttcaccacaagttcttcgcgaatttgatgctcgtcgttattagacgcacgatttagagattttaggttcgattgaaattgctgtgaaatttgaaataacatagctagttctggtgcttagagattgcatgtggattgttcttatgaactagctaagtgttactgcgatttatgttatctgcgattttctcatattttgattattatgaatttggaaccaatgagtatcattgtgaagctacaagttttgtgaatgcatattcaaatgctgaatttgtttgcttatgataggataatgaggaacctaagctagaagatgttctgagtaaagctgcaacgagagacaggacagttgttttgcaactttgaatgcagcatgggcagctcaggatctgttattgacgcttctttgagagttctagattggggaa

SEQ ID NO: 49773 - DNA, 537 bp, Arabidopsis thaliana
gcagctaccagtttttcaacagagggagtagctggtgggactcgtggttgagtgggttgactggtgagagtgggctcttcgattgttttgtcagccaaaacatcgtcttgataaaaatcctccccctcttgaaccacattgtcctcagtgttggggttaggctctccttttggtggcaacgctcgtcctcttcttagagtgattgagtgggcatactcctttgaattatgtattggttatcctgtgatgtatcctggtgtggctgatgtagaagcggttgtgccttctatatgtcgtacccttttgctcaatgattcgatcccgctactcatttcaacgaactgtttgtcaattttgttgtgtaagtcagccagcttcttagcgattttccattacttctgcggcttggcttgcattatttgatggagcatattcttcatgtctgattcctgaagtgctggtgctggatgttgctgttaataccaccagtggaacatgttgcttatgaacgaaccgttggctttggttgtaaggaca

SEQ ID NO: 49774 - DNA, 531 bp, Arabidopsis thaliana columbia
tgttcttataaagctagtttattttttgaataaaaaaataataataccattttgtttatttaagaaaaaaaaaactaagataaagaaatattgcattaaactttctaataaaaacgttcatacttggacatcatgatcatactgacagaaagcccacaatagttacgtaaaactttgaaaagttatttttgtcccaaaaacatgattaaatttgtttgtggttattagaggtaattactctaaaaacattctattaaattttctgctaaaaaaagttcttacttgcgcatcataatcacaaaagattcatcatatctctatgtaaaaacttaaccaaaaatatatcaaaaatctaaatgggccgataaaacaatagataataaatttaaagcccaatgttctgataaaacgttcatacatgggcatcatgatcacaaaaggctcactataatttaagaaaaatctaaaccccaaaacccaatatgccccagaaatcgagcaataataaaaaaacaattctccctttttagt

SEQ ID NO: 49775 - DNA, 550 bp, Arabidopsis thaliana
gcaagcggccatagtagaagcgtggttcaagccaatgttagtagattttagcggtggctacagagatgcaagaaaggactagacatgagggaagtagaagaagggatggggcaaacgcttttaacgctaccagtaaaagagcagtatcaagtgttcatggaatggttcaggtggttctcaaagcatgggactgagtgccctaatctcagcaaggcgtttcagatatggtggcgtaggtcattccttagaggtgtagaatcatctacttgtaggtaaacaaattattccaagtgttcaagaggctattatgtatgttaggttttagcttttgtggaaatttagactgtaatataactctctctccttttgtctccacccgcatgatatgttcgtttcggatgttttttggagctaaattagtcgtaaggtttgaaaaagcaacaagtacaaaacacaaaatggtactttctttctatcgggcattactatatttgtgagtaattgtttatgattatggtagctacagtgccacaaaaataccattaaaaca

SEQ ID NO: 49776 - DNA, 490 bp, Arabidopsis thaliana
cgtgaattccttttttgcagtggatgatattgtcgttgtacaggcaggtagatggattttgtatagcactggtgaatgggaattcaagcttgattcttgtcgtcacggtagggcgatgagcttgatggggttaagaactttaagggatttggagcttaaggttcgtcacatcttcgggctggagaaaccttccatatctttggagcttagctacatcttcgaggacagactagctctgttagctggtgttctgccgggtccgacaatgattgggtctgattggcagtttagatgctttaaatctctaagtattggtgataaatctgtgaatctgtttgtgtgttttagagaaggcgattcagttatcgtcggtcctgcctgcgaacctagacagactagcgcaagtgttgttaagtattttgaagctggagaaccgacatttgcaggcattgtacagtttagagataaacctgttccggcggttggagga

SEQ ID NO: 49777 - DNA, 1062 bp, Arabidopsis thaliana
  unsure (1)..(1062): unsure at all n locations
catgctccaagcaatgctcccaatataggagcgtttggcttcacatgcattttaaggataaagttctccgcttcggctaatttcccagcacgaccaagcatatcaacaatgcaaccataatgctcgagtctaggctcgatcccatgatcctttttcatgttctcatatatctctaaccctttttcaactaatccaccgtggctgcaagctgaaagaaccgctgtgaatgtaacatcccttggaataaaccctaaactaatcatttgggagaagtaatgcattgccttgtgagcatgcccatgcactgcaagacctttgattattgaactccagctcaagctatccgtctcaggcaatccctcaaatacatgaattgctttctcgatatccccacacctccaaaacatatccacaagagctgtcccaagaataagattcacagtcatgtgactcttaaccacatactcatatgctctttctccaaactcaagtgcacccaaatgagcacaagacgaaatcacactcaccataaccgtctcattcgcgacaactccttcccttttcatgaattcaaacaagtcaatggctttctcaaaacagttgttcttcgcatacccattaatcataatactccaagtaaacaaatttctgtgaggcatttcatcgaacatctctcgtgcattctcaaccatcccgcatttacaatacccagccaccatagaagtccatgaaacaacatctcgaaaccccatttgcccaaagattctaccagcagcagcgatgaacccacaattagcgtacatatgaacaagcgaattctctacataaacatcattctgaaatccgaatctaacaatctgtgaatgcgtttgctctcccactagaacacactccatctcactagacgccttaatcagaaacggaaacgtgatgttatctggcagatccgagatttaacatctgggtatagaaccataagccttactaggctctgcaccagtggagaagcagcgaatgagtagattgaagacganaagattagggttttgaatctgagagaag

SEQ ID NO: 49778 - DNA, 338 bp, Arabidopsis thaliana columbia
atgctacggtcaagtgggatgtatctaaccttgccttgtgatttcgtactttcgtggggtgtgtttgacgagatgcaagtgacctcaaggggttcgaaggacccggagagactgggttagctacccaagggccggtgtcgcttacacgacggtgtagccaaggtgatgttctggttatatgcctttggggttataactcgggtgttgacgatgtgttggggaaggcagtgcatccgggctctaattaaaactttaagaaacgttatcttcttgttgtgttgtgtgttgcttgctaccttctctgtgtactctgattatttatgttttgcatgtgggga

SEQ ID NO: 49779 - DNA, 545 bp, Arabidopsis thaliana columbia
cagacatgataacagaaacacaaatcataatctgaatagtttgcattgatgaattagaaatagagtaaaaggagttcagaatcctctctacagggattggattcttctctctaaaagtgtatctcaatataaaaaaaaaaagcttaagaaaacatatgtctaacaaatgaccaaataattaagtatatcagtgactaaaaacatgcagggactactttgcaaataaggaaaacttcaaggcttctcaaagacttggcagaaatcagaaattagccgaaataagggtgtcgatcgacataagtgtggtgtcgatcgacaccatcgcgtgaaaaacgtttttgataatcttcattgctgaaaagcctcaaaaaatctatattatgcttcatagctccaaaatgtgtaagtgcacctgaaatgaattaaatcatacgaaaaagactagaaagactctaaaaaccattctgaaactatgttagaaatgagtaaaaaccaggacatatcaatcctctatcttcacattgtcaacacctgacaagacctta

SEQ ID NO: 49780 - DNA, 1461 bp, Arabidopsis thaliana
tccccacctatactatgtcgtgctttaaaatcctaaaaacagtgtgtcaacaaatagagtcagttatggcagagttttggtggaagaacaagcggaacggtagaggcatgcattggaaagcttggagccatctcagcaggcctaaagctgtgggagggctgggatttaaagagatcgaagccttcaacatagctcttttggggaagcagctttggaggatgcttactgaaaaagattctttaatggcgaaggggttcaaaagtaggtattttagtaaatctgatcctcttaatgctcccttaggttcgcgaccatcctttgcctggaaaagttttcatgaagcacaagtgcttattagacaaggtgcaagggcagtggttgaagatggagtctctgtgaatatctggacggatccttggatcgattctaaaccggcaaaggctatccaaatgatgaaaagaattcctctggacagtcaacaagcggctagtgctattaactgtgttaaagacgtaatgtcgttggatggacgaggatggaataacactctagtgaaaatgctgtttacagaggaggatcagaggaaaatcttgggtctccggccagggggtaaggatacaaaggacaggtacgcttgggactttagtcgctccggtcactactcggtgaaatcaggttattgggtcatggctgagattatcaatagaaggagtgcacctcaagaagtccttcaaccaagcttggaaccaattttccaacagatttggcggttagaggttccacctaaaattcatcattttctgtggaaatgtttgagtaactgtctttctgttgctggaaaccttgcccacagacacctggctagagataagggctgcgttagatgcccattcctaggagagacagttaatcatttgctttttaaatgtacctttgcccggcttatttgggcaatctctcccttcccagctcctccagggggtgaatgggttgactctctatattcaaacatgtctcatgtcctcatgtgcaatcagtctcagcctcacaaggctgactctcatgagatggtaccctagattctttggagattgtggaaaaacaggaatgatctagtgttcaaaggaatagaattctcagccaaacaggtgatccttaaggctacagaagatttggaggaatggaataaccgcaaggaaccgcagccacaaaaagttctccctcaaccgccaggcatgcaatgcaggagatggcaacccccaagctacggttgggtgaaatgcaacacagatggtgcctgggttgatgtagctccgaactgtggcgttggatgggtgctgagaaaccagtttggagaggtgttgtggatggggctaagggccttaccaagagtgcagtcgatgctggaaactgagcttgaagccctgagatgggcaatcctttcattgtccagattcaatt

SEQ ID NO: 49781 - DNA, 892 bp, Arabidopsis thaliana
attcatgtaagaactagagaacataacgcaggcattagtggaataaaattaacgtagcaggatagtctacttacaagacgaggtacatatccaatgaattttctttccttgatttctcttccagttcagaaagtcgtatacgagcttgtcttatgtcattggacatactagtagatctgtcaagggttccagaggtcttctcttccatttgcttggttagaatattaacatatctctccatatcacttgctgcctgcccataatccctaatcatctcgaacaacgtggcccgtctagaaatagcctgagaataaagaaagaaagaaattaagtgacacaatagagtactttttcagccaatcagacagaaaagtagccttgaatcatacgagaattgctgccacatccttaatgttgtagcttatgcatttgaaacgtaaacagaaacactgatatacagctggacagcaacctatttacttttaagagaagttattacccaacgatcacaatccagttttatatcaaaacgttgaaacctttcaactacattccgtatttccgtggaaaccagaaaacaaatgaaaccaaaagtgatatgttaggattaaaacctttgagtaattttggtcaagagcaatagcaaggctgcagtctgcaatagcgtcagaaaattgaccaagagccttatatgcagctgcacgattacagaaacacacagctgtaaaaggacgtgattccacattgcaagccagggctgctgtgtaatgttcaactgcttcagtgtgtcgtccagactgaaaggcttcattccctgtcgcctgtgatttggtaggacataataaacggcacgaaaaatgagtagacagcacaactaatgtgtactcttttt

SEQ ID NO: 49782 - DNA, 636 bp, Arabidopsis thaliana columbia
atgcaaagttttaagaagtatgaagcttttcaaggataatagaatttcaatacccaaaaaaaaaagaaaaaaaatcagatctcagaaggaaaaagaattgaaatttaccctgaatttgattaaaacgggatatcccgtaaaacctcagattctccgagattgagagtctctcgtctaactcagaaaccgtaaatttaaacacccgacctagacgacgacgacgacgaagcttgggaagaactcgattggaaagatcctaacgacgtcgtttcagaagacgaaaaccctaggcaagaaagaaaactaaattagtctcgttgaccaaaaaaagaaagagaggaaattaacattaaaaaagagaaactatacaattcaaaattttaaagtcttattatgatgatataaataagggaataaagatcatcttcatctcactgttaagtataatggccgagctccaagggacagaggctacaacctgatgaagctacgtggaacatggcggatggtctcgagaaacggacacgccgagccaagaagatcacctggtcatcagtacaacatgggactcaggggatgttgggaatctgatcaaggagatgattgaggatatagaacgattaaatgtgtgttgtc

SEQ ID NO: 49783 - DNA, 861 bp, Arabidopsis thaliana
caggtgtttgttttcctttgcttctcctatactggctcttaagtgtaaggacttttcttccttgaatttgcgctaaaggttattgataatgaccgcggagttcatatgaggcccatgcctggaatgcttggtttagtttcctccaattccaaggtaaaaatgttattctcttctcaatgattttgcatatatggtgtaatcattgaaatggtaaagagttagtgaagcaaccaacaatccagcttcaatactcaatccaaatttttatctttcctttgcctgatcagccttacgattgtagaagtttgtgtttgtgtttgaatgagcaggaaaagaggaaacctcccccagtcaagcaaaccgaggtgaagaggacgaggagagatcgtggtgagcttgaagctataatgttcaagctatttgaaggccagcctaactggacattgaagcagcttgtacaagagacggaccagccagctcagttcctgaaagaaatactaaacgagctgtgcgtgtacaataagagaggatcgaaccaagggacatatgagcttaaacctgaatacaagaaatctgctgaagatgatacaggtgggcagtgaaatcaaccccttgtgtaattcactattatatacatgtgacatagtcataacattattataaaccctgagtcattattcatcagaagaaaaaaacaagattttagtagggaagagaaaagaggggttttaagtggtcatcttttaatttgtatctttaatcgaaacagacaaatataaaagagagtttttgtttatgacatataacaaaattacaaaatcatgtggcggtttggttggatataaacatataacgaacaca

SEQ ID NO: 49784 - DNA, 590 bp, Arabidopsis thaliana
gtatgcaagaatgaaaaacacatcatctcgggtaaaagagttagtagtcatttgtttagtcaaagatttatgcctgattattatgtttggtataagcatggagaagaattgaatatggatataggaactagttacacggataggacgtattttagttcgaatcatgaagaagtgggtaatgttgtagaaaatgcatatgtggatatggtgaacgatgcattaattttaacgtggggtttgatgataactatcatcaggatagttatcatcaggatagtagttatcaaaatgtggaagaaccggtccgtaatcattcaaagaaattctaggacttgttagaaggtgcaaatactccattgtacgatggttgtcgtgaagtcagtcgcagttatccttagcatctcgactcatgcagaacaaggcggattataatatgagtgaaaagttggtggattccgtttgcgaaatgtttatagttttctcaccaaaagacaaccaggctaccagttcacattaccaaaccgaaaagttgatgcgcaattcaggacttccatatcatacgattgatgtttgctcgaacaattgtatgc

SEQ ID NO: 49785 - DNA, 504 bp, Arabidopsis thaliana columbia
atattttgcatgtatcaaagctcttataaacaagataggatattcctacatagctagctgggacccacggcaaatggatcataaagtcttcaaaaaagaatagatatgattgcattgcatgtagtaacagatgcgatcataccaacactaatgcaccggatcccatcagaactccacagttaagcgtgcttgggcgtgagttgtaataagatgggtgacctctaggaaagtcctcgtgttgcatccctctttttttttttgttaaaaatgtatgactctataacttttagaccgtgaggccaaacttgacatgtgatacattttcggaaagcccaaagagagctcgtcgatgaatgagggagcacaatggaattcttctattggtgtttttttctaatccaaattttgatcttaatgtacttttttcaggccttttcgtgatcattgctttattacggggcacaaattatatgttcggatatttgtttcaaatatgttgcatgt

SEQ ID NO: 49786 - DNA, 556 bp, Arabidopsis thaliana
atcccccatcccaggtggtgattaagtcatggggcagattcttctcccagatgtgtgttttgtcgcccaaggagaatggaaacaacaggagtttgaatccgtcttcactgacaccgttgattttggttaggtttggagagcctatcaaattcatcaaggtggtcgagtggatcctccattggcagaccatggaatttgttcccctgaatcatcgagatgagaccactcttaatctcgaagttgttgttttggataacaggaggtgcaattcctttcctctaacggtgatcccgtggtgtatctccagcaccaatgtttgcagggccattctgttgattttgttcgtcggccatttcaagtggttgctggggtacaaggttgactgtgtttctcctttctctgagttcgcgagctatgcggtcgatgttatagttgataagtaggttctggttgcatgttgatcgagtttgcatacagcagaggtatacatggatcaagaagacaacaagaaaaacacacagttagtacttgaagcgaaaattgaaaaagaacttga

SEQ ID NO: 49787 - DNA, 482 bp, Arabidopsis thaliana
gatgataggagaaatagacagagagactttggaatcagaggtttgatgcattcatgaaggatcagaagtttgaaagaagctgttattgaagaaacagagtgtctgaagttcaacaggcatgtctgaagcaatacagaccaaaacagaggaagcgggaaagtaacagttgcttttgccagcgtacagtgttggttggagtgaagaaaagacatatcactttagacaaaagagacaaatttgtcaggtgatatgagtcaaattaccctaatgactactctctcaaataaagaggttgttatagcacttagggatcgaattctacaaagttctcggatcacacaatagactaactgtttcgaataaagctaaacataaaatattataaaagtaaaagacaagacagcaattaaaagtttgttttagattcagataattaagatgttgggtctagggaaatgctcgggaaatatcagaatagtaga

SEQ ID NO: 49788 - DNA, 605 bp, Arabidopsis thaliana columbia
ccttgtccgtcgatggcacatagaattgtgacaacatattgttcagactgtcattcgtttgttgttcgatcgcattctcggttggcaccgcgaataactcgccatcctcggtgatcatccactcaacatggtttgcctcttcactagataacggaccatcatgattattagcatcttccgtactttctagatattcggacggatcggattcaatcgatatatcagactcggtggattcactatctttggccataaattgatcattcatggccacaaactaactttcatcgtcaatactacttagcggaaaaaagttctagaggttgggcacattaagaccgtgaaacagactgacaggattgctccctttactagacgacatctgcaaaacgaggtatacctatcccccacttagtcatcaaaaagacaaataatcagaatctaatgttgcattctgcgactcaattttactcgataaaatcattgaaaacctaagtgtccgcgagcatcacataaccaagctctaataccaaaaattgtaacgccacgggcacctaattacgctaaagtgaagatgatcgacacaacttagtagaggttcagat

SEQ ID NO: 49789 - DNA, 629 bp, Arabidopsis thaliana
agtaagacgctcattgtgtagcacatgccatttcattctaagaaatccagcgcaatttttgtggagaataaagtcacaatccatacaaccatagaaggactggagacagatgggatgggtgcatggcctacaccgcttgttgtcgtcacaaagaagaccattatcgtggagccttaggtaatgctctttgtggctgaaatgctgtattgtattgtcatctattaccacatatggctctatatcttctatttcttcaggtactccttcgagttcttctccgttccatacatcttctctggtagcacatttcgaatgagcgacataatcggggcacctctgacaagaaaaacctccacaagtccagtccaccttctgacgacatactccacatacagagttcacgacaccaagaacagaagtgcgaacaacacggtgatcatgccgattgatgtttatgaggcgtggagggccaagacaatcttgatggatcatgaaaccacattgaaaacatatgtaagggcttcgatctcccttcagcccgcaagcattacatgtaaaagaatcgagtcttgggagaagagtgagttggtgatcatgagctttcaagttcagaagagacggttgtggtg

SEQ ID NO: 49790 - DNA, 1446 bp, Arabidopsis thaliana
catgtttaatgctttctgttgcagatgatcataagagatattatggaggatcctgagaatgagggcccccacaatatgcgttcagactttgaacctctcttatcgtaagtgataattttcattgcttccttatccgtatgagaaactcagttctcagttttttggcatatggttgtggtagagtgctccgcctccgggattacgagacaggtgacatcatagagtttgatagtacagaggcaagtgaagaagcgctttctgacattacagagtttgggagtacggaggcaagtgaagcacattttgaggtgaacattgaggaatgcgtattcgaacgtgctttacatatctggcagaaagaagaatggcataatcatacttctaaagcttcaaaatcctcattccttagcaggagccttactctgcacgcataaagaaagtagagaaagaaatcaatgagctcgccgagaagatctgcaatcttggtatgttcgcactcttgttgctgaagttttgggcttgcttggagttagtgacttctgtttagggcatgactaaagtgaagctttcactttcattgcaggtatcaaggagtccgatactggtttagctcctcccaatcaatgggatcttgtatctgataagcaaatgatgcaagaggagcaacctctgcttgtaggctttttattcttttagttctctgaattttgcttcttctctcacggcaacaataaatgtgttttcctatccaggttgcgacatgcacacagataatcagtccaaacactgaagatgcaaagtatgtcgttgatatcaaaaagataggcaaggtaaacaatatccctacgttgtggttgctacacgatcagttctgtgttgtagaaccttttgttgttcggtttattgctgatattagttttgcttcttaactgcagtatgttgttggacttggcgataaagcttctcccactgacatagaagcaggaatgcgtgtggggtatgtacatttcttcagttcaaatcctatttgaggctgtacatttctcatatgaatgaaaacttacgagaacgttatgtctctgatctgtacttgcagagttgatcagaagaaatatcagatacagattcctctacctccaaagattgatcctagtgtgaccatgatgacggttgaagagaaacctgatgcaacttacagtgatatcggtggctgcaaggagcagattgagaagattagagaggtatatgtttagtttagttattatcccgtgttcagatcttctctgtttaacacctagagttgtaaatttattgttgtggtataggttttcaaggaagaagttttttaaaagttttgtcgtctgtctttgttgattgtaggtcgttgaactgccaatggttcatccagagaaatatgtgaggcttggaatagatcccccaagggtg

SEQ ID NO: 49791 - DNA, 644 bp, Arabidopsis thaliana columbia
ccgacagttcttgcataagttagtttggatatttcttggggaaaacgacgacatgagaagtgacacgttgcttgttgtttctaatttcttcgtcagctgtgacgatatttttcagctaaaatatgagggtaaactagtagtttaccattcattctccattttcaatttggcgactaaagtttttatatacgtgagattctactaatttaaacattttgcaaaacttgcaacgtagacgtagtatagatgaaagatttccgaacgccacatggaaaaagtcaatgcatatcatgatttgaaatggaaaccatatctagaacgattgccgaattgcaacagcaaagaggagtggctcttagtcagcaataaacataatgattggtatattattgcctgtatacattctctaaagcattgaatttacatcagtaccaatcacatctttctattcattccagattcaaatcacaacattttaacttatctaccaatcaacttgttcatagccatccaaaccagagcttaatgtgagagactgctacagcatcaatggaaacattgcaagttgttgtgacacacagtgcaagacaagatgacatacaccggtccattaaacaggacagctagcgtttaacatactcatt

SEQ ID NO: 49792 - DNA, 551 bp, Arabidopsis thaliana columbia
tacacaagtttatgtatgaacgataatcgccaaaattaaattcgatggaaaaaaacgaaaacttttggaacaattcaaatcgtaaaaatgtgatctttacgaaattcgaccaatatcaattgcagatctaaatgctaaacataagaacaatgaacaaaggaaacaatttttttaatcaatttcttatatcaaattgatacccagaattagctggagaacgaatctaagatctaagtaaagatttgaagaaatgtaaaatggggcattggagataatgacatgaatcaaagacacgaacacatatgcttagtgtgttagatggagaattggagataatgacatgaaaatcaataggaatcatgtgagagagagagtactaacttggagaaggcagcaaaggattcttcttcgaaccaatcgcggatgtgcttgatgttacgctttaagacggtaacagattgcttcaagtcgtttttgtaatctgaaacttgactaatgaagctatccttgagagaaatgattcatagtaattttgcagtaaagagagagag

SEQ ID NO: 49793 - DNA, 610 bp, Arabidopsis thaliana
tcgaaacagtccgcttcatcattgccctagctgcttcaaacggatgggaagtgcatcatctcgatgtcaaaacagcattcttacacggtgaattaaaagagatagtatttgtttcacagccagaaggattcacagagaaagggagtgaaggcaaagtatacaaattgaataaggcactctatggattaagacaagcgcctagagcatggaacaacaaattaaacaagatacttggggaattaaagttcgtcaagtgttctaaagaaccatcgctctatcgtaagcaagagaaagatgatcttcttctagtagaagtgtatgtggatgatttgcttatttcaggttctagcttaaagctcattaatgacttcaagaaaggaatggcgtccaagtttgagatgagtgatctcgggttactcacatactatcttggaatcgaagtaattcagtataatggaggaattatgttgaaacaagggagatatgcagagaagatcctagacgaaaccaagatgagtgattgcacgcagttcacattccaatgaccctcggtttgaagctgtcaaaagcgggaccagagaaaggaagtcatgactcggagacagagaag

SEQ ID NO: 49794 - DNA, 458 bp, Arabidopsis thaliana columbia
ccttctttagaaataggagaaagttctgggccgaatttggaaatcttcaaaacatcaataagttgtgtttcgaaattgccgttaggtattggtgtcgctcgacacctacgtgcatttttcgtctccggatttcttcagcagcataaattctttgttttcctccagaatgctccattatctccaaatgaatcccaaatatgtaaagacctgaaaaagactagaaaagactctagaaatcacaaaaggactctaaaacctatacctagaacatagttaaaaacagtaagaatagggatatatcaacggcctctgaattcctatagcctccaggcttagggttcgaggttctttattctcagttgtggattctcgcccgccgttaccaccgtccttggatcgagtcttcaacttaagttctaataccaattcagataaagatcaccttatcttgacttagt

SEQ ID NO: 49795 - DNA, 458 bp, Arabidopsis thaliana columbia
ggaaataatgaatccagaaagcatccggccaaggagacttgaacccgggcagctccgagaagcctatcaacgaccagtaggtcacgcccaagtccttccctctttgtgccaccgtcattaggcaccttcccttaagcccacgactcggcccgatcacttattcacctcgcggattgtcgttcttacccctaaacctatttcttggccctcaagtataaatacttgttttaagccctaactgatgtagcgtaatcatccatctatctctttattgggtttttccttttaagttttcataatactctcgttgggctttctttgttttgaatgacggtttagtgttgcttagtcgacaagctttcgtcatctagggttttcgtttttaggagagtataaatactcttattcttgtaagcttataacttggttgttttcgttttataaaagagaagcttttt

SEQ ID NO: 49796 - DNA, 883 bp, Arabidopsis thaliana columbia
aagtgtgtaacataaaactaacgcagcagcatagtacttgttaacttaacgcatagaccaccaacaagcctcttcattatgggttaaagatatgaaaaatgcgtaatcttttgttgttgctaaatatgtaaatgttttattataaaaataaaaacaatttaagtttacaatcaaaagattgtacacctacctataaaatggtcgtatggcaaagaaattaaaaatacgtaagaataaatcagagacatggttttcagtccatctactcaacagaaacacaaactaatagagttatacgaagtgatgatgattctagtgttggcattaaaattgttgtttgagacaaatgttaatttcaagttataagagccgaagtaccaagataaaaaacactagaaacctttcaacgaaagtccaagactaagttgtcaacggcgacacccacagctctcatacacgagagctgctcgtcgaacatttccataagcgacttcagaatggaatttcacaaaaaaaatatatatataaacggtgtaagttctctctaccaagttcaatgccaaaggaactagtacaaagctatattttgtaactcagagctacaccaaacaccattagtcttacttagagctgtcaattgggcttgaccatgaccaaatggtcttgtccagttggacatttttttttctgttgacaaaaatgaccaagccaaagagtgaccaagttcaagagtgaccaagaccaattggatatgtcatggagtaaaaaaaaagtttaacatcataatactaatctaaaatgaccatgacaaacattgtaattagtcatcataaaatagttttaaaaagtttaacatcataatactaatctaaaatgttgtgtt

SEQ ID NO: 49797 - DNA, 616 bp, Arabidopsis thaliana
taggagttcttcatacatgtggtctattttcattacctccattatgcctagggttttaaattttgttatcaaattgttatgaaacctgtaatatccatatgatcttgaaattgtttcccaagtcagagtttggcggacttctaatttttcttgtaactttcactgtaggcaaaacgaaacacaagaacatatgcctctgaaactagaactaaaaggtttggcgaatctgataatgaacttaagttttctgaagaagggttgatgataggtggacttgctgctcatccaacgcatgctgccgaaatgaagcctcatcaaattgagggatttcagttcctttgcagcaatttagtggctgacgatcctggtggctgtatcatggctcatgctccaggctctggaaaaaccttcatgatcatcagttttatgcagagctttcttgcaaagtatcctcaggctaagccattggttgttctccaaaaggtattctgctacttggaaaaaagagttcgtgagatggcaagttgaggacataccactgcttgatttctatagtgctaaagcagagaaccgggacagcagctgtctattttgaacagtggatggagaagaagag

SEQ ID NO: 49798 - DNA, 1324 bp, Arabidopsis thaliana columbia
tccgcattattggatacttacgccgaataggtgtctttggcgagtatgaaatgcgattacaggtgaaatattttgacatataacatttgaggttatccttccattacattgtattcctttgtctatggaattgttcattctgtaagctctgtcttcacttgttaatggatcttcttgtctatgcagttcttaagatgccgagaggcatggctcactggaattcttgaggatttagatcagaaaaatgcctatgagtatttaaaaggcatgataaactgtcacagaatgcacctatttgacgtggttaaccaatatcgagctatattttctgatgatacatctgggagcgaagaaaattatgatggtggacttttgtttagctgggccatgcatcaaataacatcacacctgaagactctaaaaatcatgcttccaaagattactgaaggaggatctctatcaaatattttggatcagtgcatggttgagttcttctgcatcttgtgtattcctttttgaattcactgtttaactccgatgattgacattttaccttcttctcatgtccacccagtactgtgcgatggggcttggtggggttgggctagacttccggggtctgcttcctccactttttgaagagtaacaattctttcaatctaattttaactgctgtcataaccttcgcttatttctgtaaaagttcagtatctaactcgcatacttactacagggcggttctaaacttattctccaagaacatgagtacagcagttgagaattttcaggtgcaatatttgaacttttgttctggcatggaactcaactcaaacagtgtttggtatccaattatccacatgtcacactcttgaattcttcagaatgttttacttccagttagttttggattcacatcgatgggttccattaccatctgttggctttccttcaagtggtattaatgaagatagcaaggatgacgtcacacctccatcatacttgatggagcacccgccacttgcagttttcataaatggtgagataattatatactatcaatttttaacattatggatgatataaccaaaatgagtgtcctaactcccaactatgtcaaatgttgcaaaatgaaagttgttatctctcttatggatgtttttttcacagtctgattgtgattgataatcccggctatgtcaacaggggtatcttctgctttgaacgaattacgtccttgtgccccgctaagtctaaagaatgttgttgctcatgaactgatcaaaggactccaggccgtgtctgactccttactaagatacaatac

SEQ ID NO: 49799 - DNA, 900 bp, Arabidopsis thaliana columbia
tgttacatctgcattttgaaactacaacagctgcgcgaaaaccagttagagtgtttggtccgccaagttctatcgagtggtcaccaccatcaccaccaaaggatgactttgaatggttcgagatcaatatatacaagaacattgaacaaactgcattccgacccactggtcaaggtcctagccaaggcatcggacacaaggatccacctggtgctccataaaaaaacaaatactcgtatccatatttggtttgagaaactgatgttcttggtattgatccttcttttgtgtttctctttatgcaaacggttttattttattttatatggagtggttatgaatatgaatcaattaaaagaaggatgggttatatttttgttcttacttaccaaaaaggtgagatcaatctcccattattttattttttctagtccgcacaccactactttgttacaattaatatattgataatttaacacaattactaaaattgaagtataactagatgtgaaaaacatcgtccagaacagaagttaattaaataccacttgtacgtctgcatcttcaaaggcagatatcgacattttgatgccttgatgtcaaaggtatcgacatatgtgtataacacctcgatttacttgtcaccctcaagataggtttactcccttggagtatctttctaactctcttcccaatgtataacaatgcttcccgatatctctttatctttaaatcactctcttctttcccgtctacgtttctaaacttttttatatttatctcaacatttaaccttattcataaattaatgtctaggaccacaaaacctatttcacaattatttttttggtaaataatccaattaacaagtttattatgtgtttcaagtgcaaaagaaag

SEQ ID NO: 49800 - DNA, 779 bp, Arabidopsis thaliana
tcatggctagaactcattcttccatatctgtcctctggtttaagactcatctcccttttgacaccgtatcgatccacaagcgttatcttcctcactttctcgacaccatccgccatcagaattgtccccggtagtaggctgcccataaagaactcgaaaacattacaaactccgacaacaatgttgaaacattgatgaacacttacttaccagtttatacttgttgagattgtatggtgtgagagttagtgtcaagaatctgttttggctcgttttagaagaagaacacagctggagaacaggtgttgcatcggttcataccgaatctcatagcagcttggtccaaaagaagtgacaatgaacaacaaatctccatcatgtctgaaaacaactacgtcgccgactcggctggtggggagctttagccagccttggatgagtcttcgtccctccatcttcacttcccagattatatcagaagcgtttgatctcagtttcaccaccacattgctctcatttgttgttccatctatgtgcctgagaagaaatccatgggaatgtgataagagagaacaactctgaacttatcagaatgttctgcaaaaaaagaaatccagagagagatgaaacaaacaaattcatgcatatcagagaaagagagtaaaggagagagagattacgaggtggctgtgaaatccaggcagacgaggctggaaaaagtgtggactgatcggtgaaggatctatgacaatctccttttcgtatgtatgcttgaaagg

SEQ ID NO: 49801 - DNA, 552 bp, Arabidopsis thaliana columbia
tggttagattgtgctcgagttacttcatcatctagtgtcatggtaaactcgttctcatggaaattcacagccgtttgtctatctcctacagtctgaacacaggccacagaaggagacattctgtctgaaggtttctccatatgagaaggcactacatcaaccataacacctgaaagcttagcagacaactcaaagctgttaaattcttcggctgcagaagtatcatgaccagaaccaataccattttcatgattcacagaagggcttgtctgcaaagctgcacttagtagggtgtctttcgacgatctctcttccacctgtgaagaggcattgaccttttcatcagcataaaaagctctactcattcgaactctggctcgctttaccagaggcaaatgttcatcaccattctcttcacagggcctctcattcagcctttcatgagaattttgagatctctggcagctatcacatgcattgggcccaagaccttctgcttcaactttagcaggagggtcaataatgtcactggtttcacgttttctggtgggt

SEQ ID NO: 49802 - DNA, 789 bp, Arabidopsis thaliana columbia
tatgtctttgaatgcttgtgggtaatttcaggaacatggcatttcaatcagatgcttctggaagggtaagcagcttcgagggactcttgtgtctactgtgtttctatatgtgtctactttatgtttagttctttagcttttacgattttgtgaggtagtagacttctttttctgtaagagacaaaagacatgatcacataactttatattctggtataaggttcatcaaacccacctggtgatcgattctacatcggttcggtcagaatgtttttggactgccaaatgtggattcgagctctagtttagtttgctccggtttaaacgcaattcatgaataagcaaaggaaatcaatccaaacttacgttgtgaaagaagttgggccgaaaatgtctgaaacccgaataggcttttaacccctaaccccttgaaactatcttgtggcccaattaaaacctaattgtttaactgacacggtgccgtttaacttggcatctttgacgcaagtcgactcattttccgtttgtgttccttgctcatttcttatctctagaaacctgtctgatttgctccgtcgcctaaaaagtctaaaaccctaagtgtctccgcctcgtagctttacccgattcaacgaagagtgaattcgcgtgactcaagcagtatcgaaatctaccaatcatggcgagtcaaacaccgaatctcgagtgtcggatgtacgaggcgaaatacccagaggtggatatggcggtgatgaccaggtgaagacattgccgatatgggagcttatg

SEQ ID NO: 49803 - DNA, 2801 bp, Arabidopsis thaliana
ctaatatgcttttaatattgtagcctaacgttataatttgttttttcttaaagaaacagtatcttgaacgaatcttaactatttctgtacttattcgattttattcgatttttatccgtgtaaaggcaaacgattattatgtaacgacgggcataaaaagagtatcgatttcctattcggagaaaaaaaaaaagataaaaattggagtgtatgtatatttcttgaattgagagtaatacaagattacggtccaggtggcggaatattattggcaaggtcacaagaacctcaaataactgatctgaagagaaatataaatccaaaagagggaggagtgagagataagggtggtgtcataagcgtttactgtgagtctctcaaagaaaccaaaggcagagaaaagagataacacacacaaaaaaaaatggcatcaacctcactcctcaaggcttctccggtgttggacaaatccgaatgggtcaagggacaaagcgttctcttccgtcagccttcttccgcttctgtcgtcctccgcaaccgtgccacctccctcaccgtccgtgccgcttcctcctacgccgatgagcttgttaagacagcggttagtttcttcacacatatcctctcttctctaccacgtgttttatctgcatgattcgtaaagtgccttttgaatgggaatgtctagattctgttgttctgttttgccctgtttctacttttttttttcagaatctatttaaaccgaatttacccttcagatgttttgtttcagttttgaacttttgatctagattttggtaatactatatgattgatttataatgcaattccatttgattctcttaattttggtggagtagaaaactattgcgtctcccggacgtggaatcttggcgatggacgagtcaaacgcgacttgcgggaaacgtttggattcgatagggctagagaacactgaggcaaatcgtcaagctttccggactttgctggtctctgcaccgggactcggacagtacgtctccggcgcaattctatttgaggagactctgtaccagtctaccaccgaaggcaagaaaatggtcgacgtcctcgtcgagcagaacattgtccctggtatcaaagtcgacaaggtaactaaacgcatagactgtagagtatatataccaacatgcatggtgcttaatttgaggaatcttaatgagttatgtgtatggaatattagggtttggtgccacttgttggatccaacaatgagtcatggtgccaaggactagatggtctatcatctcgaactgctgcttactatcaacagggtgcgcgtttcgccaaatggtacagactagtactctcggttctcatttcatttcctactaccaaaaaatatgcctaggttcgatttcatagtgatttattgtctctgatggttgattaggcgtactgtcgtgagcattcctaacggtccgtctgccctcgccgtcaaagaagctgcttggggtcttgctcgatacgctgccatttcacaggtaacaaacatagcgtgtatcccaagaaacatgtcaaatcggagtgtatcaagctattcacacacgactttattttccaggacagcggtttggttccgattgttgagccagagatcttgttggatggagaacacgacattgacagaacatacgacgtagcagagaaggtttgggctgaggttttcttttaccttgctcagaacaatgtcatgtttgaaggtatattcgttataaagtgcttctcttaatacaacttataatgtctgaaaaatcactaaggaaacttttacccacaggtatcctcctaaaaccgagcatggtgactcccggagctgagtctaaagacagagctactcctgaacaagttgccgcctacaccctcaagctcctccgcaacagagtccctcccgcagtccccggaatcatggcaagtttctctcattctcttcacaattaaaagattgttcgattcaatacaacgaaaaggtgttttatgaggcaaagcctaatattggttgcttgaggtagaagtaacattgtttcttgttttttttgttatttgcagtttttgtccggaggacagtcggaggtggaggcaacactcaacttgaacgcaatgaaccaggcaccaaacccatggcacgtgtccttctcctacgcacgtgcgttgcagaacacttgtctgaaaacatggggcggcagacccgagaacgtgaacgcagctcagaccactctcttggcccgtgccaaggccaattcgttggctcagctcggaaaatacaccggtgagggtgagtccgaagaggctaaggagggcatgttcgtcaaagggtacacctattgaagagatgatgctgtgaaaaaagagatgaagcagatgttttaatcacatttgtttttgagtttgcttgttattaatcatgtcaaatcattattttctctgcttactttgcgttagctactccttttaataagttctattatattgaagttatctatctctcttgatctatttaaacttgaaactacaactattccataatcaaccaattttaaattttgaacaaagaggatacaggaggaaatggtctccacgaagcttacaattctcaaaggacaacgcttagcctcatggggcctttgcatattaagtgggcttaatcttttaattggcccaatttttcgtcttctttctttttcgtccatttcccagaggattttattaagaaaaaaaaacagaaacaaataaaattatttagaatttcagagattagc

SEQ ID NO: 49804 - DNA, 650 bp, Arabidopsis thaliana
gcggatctgtttctcgcagatatctctcgactaaagacaagtgctcgagctagtccttttgctcagccgcaactcgggcttactcagcttcacgagcagcaatctcagcatctcgcttctcattatatgcagcctgctcttcaattttgcattgcgcttcctgcagccgttctacagcttgaaaggatgggtgagtctccagggtgcttgcggttggcactgcctaaagtgtctttcagacttccaagtccataatgattgcctcttgaatcactttctatggactgaaaagaaatagagaagaagatattagtgatagaatatgtaaactcaaagactaggacttagactgcaacatcttacctcgagagagatgactgtatactcctctattgtgagatcccgagatcgtgaaaagccatcagagacagcagaagcagctgcctctagttcggacaacctatctttcacattttgctcataaattagagcaatcttctccgccttccgatcaacataagtaccatccgacttagtatgtgtctggatgaacactcaccaagactgactgctctcccaatttctctcctgcaatgtaccaattaacacatacaaaatctcaaaacatcatgtgagggtaattgaagagt

SEQ ID NO: 49805 - DNA, 543 bp, Arabidopsis thaliana columbia
ccctgataattcgatttttgtaacgaggcaaattttgttaattaaatatcagattcagctcataacatgtgaatggtaagtaagctgaaatcaaaatgttcagtaatgtagtctgattgtgcctcctcccacgtgattatagactactatcacttggaattatcattggaaaagtcattacctgaaatctaccatagagctatcaacatcacatcttccttgccatgttttatacattctgaggctccgaatggtgactgcgttttgcggtgcggaagaagtgcggtgcggttcaaataggaacgaaaatacatagatacatatgtatatgtaaagattttgatactgttacagcactgttgcgatacggttttggttccattcacagcctgagtatcaccacctacttttgtttgtcatctgtcaaaacatgaatctcaaacatgtagagaagcaaaggaggtgtttgcatcaatggcgagggatgactctagcatctctaagcgtcattcgcgaatgattattgcgttatcgggcatgcgt

SEQ ID NO: 49806 - DNA, 590 bp, Arabidopsis thaliana columbia
cgtacatgatatgatcatggtctttttgtgctttatgataaattggtaacattaataataacatgcatgttttttaagtaatggtcttttgagacgttagatataccaaaaaattcaatatacgacactctctccaatatagccatatgcaaatgtaaagagagaaacctaaaagtgttgatttaaaagactgtttaatttttgcttttttttttttttcatgtgaaattttttaaagcaaatgagtagttagttatacatttgttattgaaattatgtcaatctaatacttagccatgagtttatcatgatgtgattggaatattagattaggagagaatacatgaaacaataaattgtttgcttagaatcaagttaggcaactttcaaaccaaataagtaacataattgcatatcattgtatcatatattattgatgtaagtaattcctgatagttaaaaaagattagaattttgggtatatagataagaagatttatacatgaaaaaaataattgatatttgaccaaaagtgaatctactatcaaatataattcataaaatgaatactttattaactcataatacat

SEQ ID NO: 49807 - DNA, 602 bp, Arabidopsis thaliana
tcactcgagatgatggctcttccagctattgatctctatatgtttgggcatggatcgacgggccaaatattgggtcggaccgatgtggattgggttgagtatgtgcagattgggatctaataccatattagactgtgagcttccaacctaaaactaattgacaataggtggagaggctcatatcttatatagaactttgaactctcaaagttgttaaggatcggacaacacaaattttactctgttttgtcttactctatatttcactctgtttttgtaaaacgaaaaccacacacttctattagatatacaaactatatttatagtttacatgacacactttcactaagagacacgtctctagaagacaacataatgtagagacacatacacacatgtaactgttttgtagttaacaattatattcgtatctcttcgatgtgtgatacgaatatacattaatcagttacttaactatataatatatgactcttctaaaacaataaagtaagatgatgacttgatcacttccaacactcctccttgatcatggcttcatcattacatctagctcttctcgtagacttcgaacagtgatgtgt

SEQ ID NO: 49808 - DNA, 449 bp, Arabidopsis thaliana columbia
ttttcatttttgtaaagaatcccacttagagaacctaccattggaggatgacaaaattaataaattttctaaggttctaaagcaccctcaatagtgtatcttaggtatatcttaacaaaattttaggattaaaaatgattaaattaaatcaaactaacaatcttaatctaagaaatgtatctaacataagatgtatttgcatagctaagatgtgtctatgtgtcacatcctaattggtttaagaaatgagcaatagggaaaacaaaaaacaaatgcaaaattaattttctatccttaagatgcaattgaatcttaaccattggagatcatttgtgttaagatgcttaacttttagtcttagctttcaaaaggcaaaattttatttctaaataatgctaagattcaaaattcagaactaattgattcttaaccattgaggatgctcttac

SEQ ID NO: 49809 - DNA, 621 bp, Arabidopsis thaliana
cagagataggactgggacttcctcccaagtgagcttgttttaagtctctagcttgactcctcacactcattaggctcaaggatggtgatagagtagaattgacgtctcttctccttccttcgtagatacaacatcaaattcagcatgctctcgtgacaggtctataattgagtactcaatggccttttcttggtaagctcctttttcatcatctggatagtcgtcttttctagactgttctaatgtgaattcacatccttcttttttaaccataggaataacttcatcatttgggatgtccttgatgtcgagtggtgcttggttggctttcccatggagctccttaatttgatctttcagctctctcacagtgtgtgttagctctcttataatagctttgtcgtgccaattagacctctccttgagttctaaccaatcatttaatgccctcatgcttgactttacgggtttggttaagcactctagtctagtatcaattgagccttcctcgttcaatgcaacatcctctctttctacccaatgacacctttaaagatctttgatcctagtactttgttgtgtgagctaatgacactcatagtcaaggtccactggagagaa

SEQ ID NO: 49810 - DNA, 516 bp, Arabidopsis thaliana
cctgtccatgcaggaatgtatctcacattagtgcgacgatagtaaaccatcactgttcttgactctgatcggttccaacacctctgacccgagacactgtcttgtttcccattctaactgacccgcctgcatcctcattgaactcatgaaaccattcccttttataggtcatgtgatagctgcaacccgtgtctaatatccattcatcttctaaatggacctcagttgatgacaaagcttcagacacgtaatatccagctgcttcagccagatttcctttacctcctgaggactctcccttcactacttgactctgcttgaactgaggtttgttctggttaggacaagaagatctgaagtggccttcttcaccacaagtccaacaccctggtttcttcttggacttgcccttctttcctttaccctttcccttttgttcacccttccctttattctcattcttgtctttaacataaagaccctcagcctgaaccttgatacttttcttcactgagc

SEQ ID NO: 49811 - DNA, 584 bp, Arabidopsis thaliana columbia
gatctataccactagagatttatcgatagatttatgagaaaggagggctagatcttcacaagaactttgaaatttatattgctaagaacgaatggacttttgtattgataataagagagcttttacaatgtcgaatgggattacaagtgtaaatgttaagctcaatgaatgtgtcttttccaagtcttccttgcttttttatatagacctacgcacgtagggagctccatccgagatccgcggagattctcttggatattcggcaggtcaattctgagatatcaggtccgctccgcgaatatctccatatcagttcctaggttcttatctgcttatctctcttcgtcaggtgaccgagcttattaggcccaaatagctaatttgtacgtgggaagcggagttacacaggtcctctacttggtgggcttgctgggcatattgggttggccttgtattttcgcaggtggattcctgaagggaaatccagctccaacagagttctacaaggactttatcatcaagcatccaacattccatatttgaggccaaagatacactgaagaagggagtattgctacatgatg

SEQ ID NO: 49812 - DNA, 683 bp, Arabidopsis thaliana
acgtgatgggccttctttagaaataaggaaaagttctggaccgaatttagaaatcttcaaaactttaataagttgcgtctttgaattgccgtcaggtattggtgtcgctcgacatcaggggtggtgtcgttcgacacctacgcgatttttagtctctagattacttctacagcataaaatctctgttttctttcagaatactccattatctccaaatgaattccaaacatgcaaagacctgaaaatgactagaaatgactttagaaataacaaatagactctaaaacttatacttaaatcataggtaaaacctgtaaaaatagggatatatcaattacctttatagcttacgttacataagctaataggacgaaaacctgacatttcgcgcggtttttcaccttttgagataagaaaaatatttgtctcattcaaaaatatcaaaactcaaaaaaatcttcaccattttggtgagatcaccttttattattttccaaaaacgttggaaaaatagggccgtcatcccatccggtcctggaacttttgtcggatttagagagcgcgcttaacttcctcttcggtaacttctttgactaagaactcgttcatggctggagagaccgatggggagataccataaggactaaggaagggcaacgatgttcgaagatgagaatagattt

SEQ ID NO: 49813 - DNA, 693 bp, Arabidopsis thaliana
caatgactaattgacttattttaggttcacattgaaaaaaagaaacttttttatttttaacatgggacaatcagatctctcagcgatactcaaatcagatgctataacagtatcagcgaatcagatgctgaaatctctaaaactaaaaacttggtttggctgttgttagattttgaaacctgaatctgaatggcatggaattgatttcttcttcaacaattggaaactcagctctgtgtttaaccctaatctccattctcatcttcttcttcctcactacaaccaccattcccactttcccggatcatcctcttcgttctcttctcgatgactcccaaatcactacgaacagtagctcaatcgttaatcccaaatcctcttgtgtctcctctagatcccacgataatggcggcgtcatcaactatttctccctccattactgtatcttcaacgaaaacctattcttctcgatcccaatattgtctcttctcattcttcttcacttttacatactcattaaaaccgctcagactcatttctccaccgtcactacaaagctcgccgatcgtctcaatctctctccaagcatggctgctgtgactcttttagccttaggtaatggcgcacctgatgtctttgcctctgttgccgccttgcgtggtggtcagtatcgaaccggattcggagctatct

SEQ ID NO: 49814 - DNA, 431 bp, Arabidopsis thaliana
ctagtaaacgaaatcaaaagcaaatactgaatactgaatagattaagagaaatccagattacgaaaacatcaagaacacagtgtcgacggaaaataaaacttaggtaaacgaaaaggtaaaatacatgctacttatagcaaaatattccgaaaccctaatacccaaaacgacccagtattgggacggattaagaacagtactcgacccaggtggtcgagtgattggtcgagtgataagctggagtcttcttctcttccttgtgcttgagtgtctcgttgaatgcggaatggagaagactcggaagctggtagtcgagtatgaagtcgagttatggagatggtggtactcggcttggtggtagagtgatctgtagcgttccgatcctcgataggatcgccggataggacttggtctgagggagaaggtggac

SEQ ID NO: 49815 - DNA, 584 bp, Arabidopsis thaliana columbia
tagaggatccccggatgaaagaaactggatggtctcttccttatacccctccattggccgaaacatgtgaatattcaggctgcattgcttaaacatgtactctacatcatcatagatgcaaggtttctccatggtctcaggttgagggtatcgagttcctaaaaactcattgcgcttcagcagcttgtagtactcgtttccagttgcacacttctctaattccaaatcatcaccacctcctctctctgtttgatcagcttcctctggtgaagctatttcttcctcagagtcttcatctaccagttccaacctcctccccacgggcgtcttttctcgagtgatgtctgccttgttccttgagaattcccttgcggaggacttactcgactttcaggaccgagtatttctagcaggagagctaaaaatttcttcttcttgcatcacttcctcctcttggcttgattcactgtgatcgatctcgaaacttgcttgttctctcctactcgaccccttgggtgatggttcagaaagtcctcgagctgctgcatgcgaagaaggtgttgggtactcttcgatggggagag

SEQ ID NO: 49816 - DNA, 530 bp, Arabidopsis thaliana
ggagaatccgggtattccatcacgtaagatattggtttcgttcgacacctacgccgtttttagtctccggatttcttcggcagcataaattctctgttttcctccagaatcctccattatctccaaatgaatctcaaacatgtaaagatatgaaaaggactagaaaagattctaaaaataacaaatagactctaaaacctttacctaaatcatagctaaaagcagtaaaaatagggttatatcagtacgcaacagggccaactctttccagaatcctgaatgaacccatgtacctcgaagtcaactttgtgttcaaggattccctatcctttcccttatacgtcatagtcttgagataaaccatatctccaacagaatactccaactctctctaacgcttctctacatctcttttgtcagttctgagcttgtttcatcttaacctttaagactttgatattttccgacgttttctcaactaagtctcgaccataaacactctggtccccacttgggtccacatagcagtg

SEQ ID NO: 49817 - DNA, 616 bp, Arabidopsis thaliana columbia
atctcaaatcctaatcatcaagaatatacactatgtacaaataaaatgaaaacaacttcgtacactaaatcctaatagattaaggacgaggagtaacttctctatatatatatacacatagtttaacttattctactagagaaaaaaaaaacagaagagagagttcataaacaatgacgttcgaagaagaggtgtctaaagaagatattgagtgtgtggaaacattactgatcgatcaatcttgagctggcggacgattttcttcgacggatgagtgttgggtcgatcgatctccacctgggatcgatcgatccagtgttgctaaccccggtttctcgattcctgctatcgtttctggtccaaatgagcccgataagtcccgaaaacatctgtgtcccgcttaaacacctaaaacctacaaatgactcaagacacaacagaaaagacgcaaaagacggactacgacacgacaaacgactcaaaacacggactaaatcaggactcgaaaccgtcaaaaacgctatacatcaactccccccgacttagatctttacttgtccttaaggaaagcagatatccttatcaagagaagaggtctgaaaatatggtaatcctc

SEQ ID NO: 49818 - DNA, 560 bp, Arabidopsis thaliana
acaggatctttcttggcaaggtactcaaagacctggtgcatcttctcggcactcttttgtagttgtgtcgcctgagcttgaagagctgcttcagcgtgtgcaagcttctccgcaagaagaacaggatcttcagctggaggaggaggaccgctatgggcagaggctgcaaagaaccaacaccataaattctatttttctttctcggagcaacctgccaacaaaacaatccatgtgtaagctttgattcaaaactaacaatctttaaatcgatggagcattacaacaagtaaactgctaagcatacatcctaactatttgcatcatcatcatcaaaatcagacaattaaataataagggcaataaaaatctgtgaactaactaacaataacaatctatatatgcaagtcaggtcaacacaggtacttacactagttttcagaaacaacaaagactcaaagaccaactgtttttcagacacaactagcactaacaatctctatatgcgagacgagagaacacaactacttacaactattttcagacacaacaagactcaaagc

SEQ ID NO: 49819 - DNA, 864 bp, Arabidopsis thaliana
tttgtggttgttgatagattttctaaaatggcacatttcatcccttgtcataaaactgatgatgccatacatatagccaatctgttctttagggaagttgttcgtttgcatggcatgcctaagaccatagtatcagatagagacactaagtttcttagttatttttggaaaactctttggtctaagctaggaactaagttgttgttttctactacttgtcatccgcaaactgatgggcaaactgaggtcgttaataggacattgtctacactcttgcgtgcattgattaaaaagaatctaaagacttgggaggactgtctacctcatgttgaatttgcatataatcactctatgcattctgcctctaaattttcgccttttcaaatcgtttatgggttcaatcctactactcctttggattgaatgcctttgcctttgagtgaaagagtcagtctagatggaaagaagaaggcagaattggtgcaacagattcatgagcaggccaagaagaacattgaagagaaaacaaaacagtatgctaagcacgccaacaagagtagaaaggaagtcatcttcaacgagggagacttggtttggattcatctccgaaaagaacgttttcctaaagagagaaagtccaaacttatgtcaaggatagacggaccctttaaagtgctcaagaggatcaacaacaatgcctactctttggatttgcaaggtaagtataatgtgagtaatagttttaatgttgctgaccttattcattttattgcagacaacacagatttgaggtcaaatccttttcaactgggagaggatgatgtgataatgacaagcttggatcatggagctgatgagataatg

SEQ ID NO: 49820 - DNA, 578 bp, Arabidopsis thaliana
cttcttctacaatttatttgcaacactaatctcagtaccagtatgtctttttgcggagagcaacttgacttcttgggtgcttaaaccagacatttccctcgctgcaatcatatactcggtgagaagaatcagatcttataatctgcttcaagaactgacgattttataaactcagaaattaacactttgtttcagggagtcttcgtttcattattcagcgcgcttacccacacatggggtctgcatctgaagggtccggtatacatatccttgttcaggccattgtctattgcgattgcagtcgccatgggtgctatattcctcggcgatgcacttcaccttgggaggtaccatctcttttatcttcttactttccagcgtattcagaatattttatctgtactgagaaatatagtactcagctcttggtagttgaaatgcttagtatgatgtatctatctatggaatcacatttagagagttatatggtttctggattctattctacatgagctctcatatatggtttcttctgtattatttcacatgtgagaaacacttagtctccacaattccac

SEQ ID NO: 49821 - DNA, 550 bp, Arabidopsis thaliana columbia
tccgttcttttgtgatgattgcttgacgagatgcaacaggcctcatggggatcgaaggaccaggagagactgggctagctaccctggccggtgtcgtttacacgacggtgtaaccaaggtgatgttctagttatatgcctttgtggttataactcgggtgttcacggtgtgtcgaggaaggcagtgtatcggaccctaataaaactttaagaaaaagttttatttcttgattgttttatttgttgtttactaccttctctgcgtttattctgattgtttatgttatgcatgtgaggattatgggtggggttagactaacgtttccttggggaatccgaactcattgagtaatgctagattattcatgattatacttgttttgcaggtaaccttagagtggtttagagggagtggtgaacgctaggaaacccgaagtagtttttcagtgtccttttgtaaaactcaaagtatgtattttagtatggtgtacttttgggcctcatgccttggccataaagacgatgtgtacgttgtaattttcccttgtatt

SEQ ID NO: 49822 - DNA, 870 bp, Arabidopsis thaliana
cggcgcttgaaagacatggttagcaccgcaagagaactagggagcagcctccatggattggtgaaactctgtgggctgttatgtgcgcttactgggacaccgaaccagcacaaaaacggagtcggacctattccaaagctcgtctctctgaccgtaacggtctcggtcctcacatccacttctctgggccaaagtcttttcaggaaatccaagacgaattggtaagtttttctcttacctctttcagttacctcacatgtaagtttttgagtatttgagctgtgttggtttcactgcaggaggagaaattgggaagaatagtcactattggtgaggtgtttgtcgagactcatactaagtcggatggtacgtatgttgatcggaaggcggagttgattgctcaaacttatgagcagaatgtgagagatagattgtcacaactagaggcagaagcttctgttgtgtctgatggcacttcacgacctcgggagctgacaaatgaggagtatacaaccatctttctcgaggtaaaatgttgtagtctaattcctagactttgagtttatgattattctgtcactaatctcttttttatttcttttcagtccaccgaaagggattcaagaggcaattcttatggacttgggagtctcaaagaaacattaggttgtgcgaaccacaatctccctggagaatcatcatcatcctttctagatttagaagaacggctgaaggaagcgcaacgcaagattgaagagcaggctgcctacaatgagaagcgagattctgagattgtgcgcgtgaaactgagatagcccgagtcacggctgagcaaaagaacaagctcaaacacttgtccttagtggagaa

SEQ ID NO: 49823 - DNA, 564 bp, Arabidopsis thaliana
gtacacatttacattatataattaaaagtgaacgatgtgtacgacaatatgatagaatatactaaattaacttctgacaatctccaaattaaatgtagttgcaatcatatatctaagataggtttgttcataataattagttgcaaagaacgagaatattgttcttggacgattaaagcaagtgcatagtaccggcctcccgcttgccgtgctcgtagatgtcaaccgagtatttctgacggtagaagaccatatctgcttctcgaatggttgtcaatttcgaaaaagggtgtccaaacgcaagcaactccaagaacttcatcgtgtatggcccgcaatctcctgtagtcattctcgccttcacagccgactcccgcgtgtgcgatattaaagcgtcatacacagttattagccgttcattaaggttgattccaaagcaacccaatgttcactcttccagttcatcggagcatacacaacatcgacatccttcagccacttcatattgggttcacggtttatgtgtactccattagcaatgtcggacagtaatttccccatttg

SEQ ID NO: 49824 - DNA, 807 bp, Arabidopsis thaliana
ctaaagaacagcgccgcaaagttaccaatagtggtacgaatgtgaaatggctgacgacgctccggtggtaaggtttctttaatcaggaagaaaatcattgccgaagccagaatcgccgctaatgccaggatccagaagatgtaatgccagctcagccacaccagcacccagccgccaactatcggtgccatcagcggtgcaatggttgtcaccagcatgacaaacgacatcatccgcgagaactcttctttcgggtaaatatcgcgcatcagggcgttaatgaccacgctggccgcagccgcagccagcccgtggaagaaacgcatcacaatcagctgatcgatggtgtttgccaacgcacacgccaccgcggcggcgcgaaacaccagcgtaccgccgagcaccaccggcttacgcccgaagctgtctgccatcggcccgtagattaactgccccaacgcaaagcccagaatataagtactgagggtcatctgcgtactgcccgccggtacgccaaactgcgctgaaattaccggtagcgcgggcagatacatatcaatcgacagcggcatcaacatggccagcaggcataggataaaaacaatagcaaacgacgaatgctgtcgggtggtcacaacgggctcctgaaagtcattgaaaagttagacgacgctggcaatttcttcttcagttaacggacgatattcaccgggggctaaatcagcatccagcgtaataccgcgaatacgtcacgatgcagctcaaccacgtgttaccacggcggcgaacatgcgtatcacctgatga

SEQ ID NO: 49825 - DNA, 747 bp, Arabidopsis thaliana
accatcaaggaagtagagttaaggatacctcttgtcgacgctctagcacttatcccggattcccacaagtttctgaaagacttgatcgtggagagaattcaagaagtgcaacggatggtagtattgagtcacgaatgcagtgcgattatacagaagaagatcattctaaagaagcttagtgatcctggttcattcactctaccatgctctttagatccattggctttcaacagatgcctatgtgatttaagagcaccagtcagtctcatgccactctccgttgccaaaagattggggctcactcaatagaaatcttgcaacatatcccttatcttagctgacagatcagtaaggatccctcatggtttacttgaaaacctaccaatcaggattggagctgtagagataccacagactttgtagtcctagaaatggatgaagagccaaagacctttgattttgggaagatcgttcttagcaactgcaggagctattattgatgtcaagaaagggaagatcgatctaaaccttggcaaagattttaggatgacctttgacgtcaaagatgcaatgaagaagcctactatagaagggcaactcttttggatcgaagagatggatcagttagctgaagagttactggaagagcttgcagaagaagatcaccttaatagtgctttgaccaagaattgtgaagatggatttctgcatttggagactttgggctactagaagctgttagattca

SEQ ID NO: 49826 - DNA, 524 bp, Arabidopsis thaliana columbia
cattattttttctcgagaaattattcggttattggctttggtttgcgtttgatgaactaaaccgatggtttaataattaacaaccgaattcgtagcaaattagatttacctcttaatgggctaggctgggctttaaatgtttactgtgcttaaatgtaaaacattgataggcctcttacttctaaatctaattttctgttttctcgatctccgtcgaaaccaccatgcccagagatctcgatctctgtgatttgtaggttatcatggtgaggtgtcaatcactgcttatggtgagaagaaacctgacagtctggatgatgtaatcgacttcgaacccaaaagtgattgtcctttacttaaaccctagttcttgtttattacatattatatatatatatatatatatatatatgtatgtgcagtgcaattttacatgttagttgataactgatatatacatttttttagggggtaagagtgagagactgtacgagatgttagtggtgattgcgttttggtcagtg

SEQ ID NO: 49827 - DNA, 818 bp, Arabidopsis thaliana
gaaagcaaacatgctttataaagtttagtggttcatcaaagggaaatccaggtctagctgacacaggagcagtattaaaaactaagaacagaagagtggtatgaagttatcgttacaatgttaagaaaacttgtaatgaagtgaagtttctgcatccatatccaatcagacttgtaaactgcatcaaggtctaggaaatagctacaaacaacgtagctgaatatcgcggattcatcttacgattgaagtatcccattgaaagaggttacaagattaagaacttagaatcatttgaccctgaccaattgtctataattctgaatcaaatcgtttctacttaatgcaatgctactcaaagatcatgatatcaacaaaaccgatatgaaggagccaaagcaacaagctttgattagaaatgaacaaagttctgcgccaagatcaaaagcaacacactaaaacaaagtctacacttctattattcagcgatacattcttgaactaacaaagatccatctctcaacaaaaccaatttagcaatgagaaagaaagagcaagtgtaacaactatgaccctttataaaaccttaatcagctttgtatcttgagctcatacacggaacaaaagcagaaaaatcgaacctttagatgatcactccaacacaactttagcaccaagtgctttcaacttctcaagaatcttctcaccttcttctttagacaaaccagctttcaaaatagcaggagtcttctcaaccaaagctttagcttctttcaaacccaaatcagtaaaactccttaactctttaataatcttaatct

SEQ ID NO: 49828 - DNA, 578 bp, Arabidopsis thaliana
cgtctagtctcattagctctctcaggaatccctctttcaacaacaaacatcacttctgattcagagttttcatcgcatttggaatacttagaattgtcaggctgcaacatcattgagttccctgagtttataagaaaccaaagaaatctatcttctatagacctttccaacaacaatatcaaaggtcaagtaccaaactggttatggagactaccagagttgtctactgtggatctttcgaacaactctctcatcggtttcaacggatctttaaaagctctaagtggaagtaagatcgtgatgttagatcttagttccaatgcttttcaaggaccactcttcatgccaccccgaggcatccaatattttcttggctcttacaataacttcaccggatatatacctccctcaatatgtggactagctaatccacttatcctagacctatcaaacaacaatctccacggcttgattcctcggtgtttggaggctcagatgagttctctttcagttctgaatctccgtaacaatagcatcgatggaagtcttcctaatatatttatgaaagccaaggtgtt

SEQ ID NO: 49829 - DNA, 475 bp, Arabidopsis thaliana columbia
ttcctctgatcttgttataggtagatccaaaggcacagatggtattggtagccaatactagctcatccaatggggatgtgaggttggcctctgagaaagctgatgttggaccttatgaagcttggggaggtgaagcacctgaagtatatatgactcccaaactagtgaacaacgagagtgaagctggcaaagattctgtgcccttgaaaccagttgaacaggcattgattttggcccagtgccttctaattgaaaggggtagtcggcacgatgagatgcaaagtaagtgaactcgaagtcaagtgtatttgcaatgtctatttctcaaaagtttaatgctttatggagagctcaggtggaaagatagagaagaatattaacacttctcctacacaattaagctactaggcatttgttgtaactgcaattagaaaacttagaaaggatcgttacggtgttgccaaattactacaga

SEQ ID NO: 49830 - DNA, 980 bp, Arabidopsis thaliana
ttttagtaaataagtgaatagttattcttgaattgcccaagaatcgcttgtcgaaaacccgtgaacctagaagaaggatggagaaagctaggaatctcgtcgttcttcaagacaggaacacaaggaagcttcacatcgagctcaggctctgtttccgtagggaatgaaacagagccatcttggtaatggtaataagcagagaaacaagcacaagactgaacccagagaaccgcacaaggaatgttgaactcttccgccacgtggcagacccatgggataaacgggttattgataagacacgagacaggctcgttcgcttcctcgtatcttctcacaagcttagacacttctcgtatcccaacgctctctaggtgagcaatgtacaaagagaaatcagctctccggtcatcatcctctgcccattcttcatcaaagaactcaaacccggattgaaccggaaccaaccgggtttaagttcaccgtcaacgattttgttggcttgtctcattttcttgccccaaagctccgttgtaacgaaggtaacgagtaaaccctttgaagcaattaacttgccgagacgaagaagagggttgacgtggccttgtccttgaaacgagacgagcattacatgaattgggtttggagatggacaagtttcgaacaccatttctgatatggatcccattttttttttcttttggtgaagtaaagaattatttgtatgtttgtgatattctcacatacaaaggttcttaatttatataaagcgtcaacgcatttattcaaatacaaaggttcttaatatatataaagcgtcaacgcatttattcaacacctacttgctcactctctctcgaccacacatcttacttaccatccacgtacgtctcagtttgcattatgtgagattttcttcttttgttgcaaaattgacgtgttagtttcttgatcataataagatttttgtaaaatgttgtgta

SEQ ID NO: 49831 - DNA, 551 bp, Arabidopsis thaliana columbia
agtatattcttttccctgggtgcagattcatacctctggaaaaacacctaacgtcaataaagcttcacgcccacaatcagacctgcacttgcaggatgccttccagttaatttcgaaagaagacaaagacaaacaaaagcagattttggcaaaccgcgatatgacagcaaaacatttctcacctagaaacatcacgcaactcccataaaatccatagaaattcttctgtttgctgtatcgacttgagcaaacgatctactgcactcacctgaatgaagtatgtaagaaacagtaggatataagtacaagtgtacgcatgtaaaggatgagccctttatggtaaagtgaacccaccaccctcaaatgcatctcaagatttattccaatttccagtaagctgcaagtaaaacccttggatattaaaattgaagcatagtggagggggacacactcctccttgttcagatcgacggatcccttcagagattgtattattgtagcagtcagttcaggatgatgtagcaaaaagctcaatcctggaaaacagaaga

SEQ ID NO: 49832 - DNA, 564 bp, Arabidopsis thaliana columbia
tactagacataagacaaagttgaactatatatgttaacatacttagtcaacttgaacccactattacagaagagtcaagttaagcacggcaattattaattaaccacataaaaatctttgttaaaaccaaaccggaagatgttaaccagcaaagaacgagtcaaaagacacaactcacgaaagcggaaacaagccaacgcgggaaaacaaaacacaccccacaaaaccaaattggtctcagcttttcataggaatcattgtccttgcactgacttgaatctcaaaggttccttattttgactcaatctcaaacgcattgtaccattaaaactctcttcttcacacatttaagatgttcttcattgtcagtttaatgcattaagtagatgaaaagagaaacaacaaaagacaagcccctttgttgtctaatctaatcccacacaagaattttggaatatcctctgtcggtgcataaatttcactcaaaacaaatcttggtttgctttcactagttaatcatatcacactaattaagcacacatgtgagatttagattgagattga

SEQ ID NO: 49833 - DNA, 602 bp, Arabidopsis thaliana
ggtcctcctcctaagaaatggaaaggtgtttgttccgccggcaaaaacttcacttgtaacaagtaattctcttaaattaatttctctcaataaagattagtattagggatgtattttcaagaaattagttttgtgtttgggcataaaaattttggttacaaaaataaactatagagttaatattaataattaatctgtgtacaatgtttcagcaagttgattggagcaagagactatacaaacgaaggcaccagggacattgaaggccacggtacacacacagcctcaacagcggctggaaacgcagttaagaacacaagtttctacggaatcggtaatggaactgcgagaggtggcgttccagcctcaagaatcgcagcttacaaagcctgtagcgagatggggtgtaccactgaatctgtactatcggcgttcgatgatgcgatacgagacggtgttgacctcatcagcatctctctcggggcaaacttagtccgcacgtacgaaacggacccgatagcgattggggctttcacgctatggcaaaggtatctcactgtgcagtcactggtacggtggtcgaatcgggccagtatgagtgt

SEQ ID NO: 49834 - DNA, 416 bp, Arabidopsis thaliana columbia
agagcatgttgagtacattgctgtatccattgaggaagaagaggagatttcaattcctctatatcaccctccttaagcctaatgagtgtgaggagtcaagctagagacttaaaataagctcacttgagagaaagtcccatgactattttttgtaaataaatttttcttttcttgttacttttgatttgttttggttgtgtttgtggttctcaggaacagaggaacgaggtggagatagagtaaaaattcaaaattctactctatctcaaaggtggagatcgagtatatcagtcaagtggagtccaaaaattagaaaattttgattgaacctggaacactgcaatcgagtatcccgcaccagaggaggaggaacaacaacaaggtcctagtattccatgggattacactagagagga

SEQ ID NO: 49835 - DNA, 460 bp, Arabidopsis thaliana columbia
  unsure (1)..(460): unsure at all n locations
tattctctatggtagttttggacctttgatatctttcatttcagtttcgatgattgcatataggttctgatcaaaaatataatacgggggttgttgttaacatacatccaaatgtctagatgttatgtataaagaaagttaatgattgtattcgtatgtcattataatgtcccataattccattagtattaattaaatctttaatggatggtaagatttgtctcttattctgaaaaagttttggttctaattaattttacttacttacttacaaagttacaatcatcctatacattttcaagttaaacaggggattaactgtatatcattttattagtattataaaaaaatttaatttaaattcttaactanaaaataagcagctctagtggaggtccatttgtatcaatagttaaccaaaagtatattaatacttctacacctaggtttcgaatctagc

SEQ ID NO: 49836 - DNA, 523 bp, Arabidopsis thaliana columbia
cttatacctaaggatcataattaattctcatttacacataattattatctcttaaatgtatctgtttcagtctttgaatttattgttcaaacgttcaaatttgaattaacattgagcttcatgggcttcaccttttcatcccagcggccttttaaaccagctacttctgatctcgattttactttcacctcgcggtatgaccacttcggccgcgttcttctccttgactaaaggagcatgtgggccacacttttgtgggcctctttcctatccatatggcaatctttggttggtatcggactttcggtgcgggatacaacacctacaattagtccccaagtctttcgaaatgttattctaattcggaagattttgatgcctttaatggacaaagattgtggcatgtaatttttctgatttcccgccaaaatcacgctactcctttgatttcagaattgcccataattacgcgcgtgacatctgttacaattatgaccacatctttagttattactattaatgc

SEQ ID NO: 49837 - DNA, 593 bp, Arabidopsis thaliana
acatttcccatacacaaacaaaccacaaaaacttgatgtcagaaggaaaaaaaaacacacacaaaaacctaaatcaacaagtccaacgtttccaatataagagtcaattgatcatagtagctttatacatgattgagcgaaggccaagagtcttgatgaaggagaagttcgccgagtccgggaatccagaccggaatataccattatcgaccatcgaaaagttcaacggtggaattaggttaagttcatcaccgggaacttctagcagtgctgcagtagcagccggcggcggctgagacacgttgttccggtcaactttagctacctcgatggtatggaaaagctcaccaccgtcttgcttctcctcctccatagtcctaaactggttcatgctcatcgtcttctcaatcagtttcattctctagctaagaaagaatctaatgaaacttatatttgttggagtgtaggaatctgaagagatcttatcttgtttttgtttcttgaaaggttatggagaagtaatggagatggtcgttatgaatcgacgaccttgctttatatagacacgccatggtagagagagaaacctatgt

SEQ ID NO: 49838 - DNA, 458 bp, Arabidopsis thaliana columbia
tgcacagattacttagactccgaatggagacgtgcggttcaactgcgaataaagtgcggtacagttcaaatagtaacaaaaatatatacatacatatatatgcaaagaatttcgttattatttgaaacgcactgcactgtgcggttcggttaccatttagccaaaaacaatagagatagaataacaaattaaatttgttcaaaaaaaacaatgaatatatttgttacttccataatcttttttttggtgagctgttatttacatgatctgattttaaacaaagactcactaaatttataaattattgactttttctgactaatataatttattattatgtaacaaagacttcagaggtaagttaaacacgaaacaattatttgatttgggtgattaaataaaggcaaaacttttttttgaaaaaaccttttgagattctctgaagacgattcatttta

SEQ ID NO: 49839 - DNA, 904 bp, Arabidopsis thaliana
gattttgctgctccaagaattcgatatggagatagtggataaaaaggggattgaaaatggtgtagctgatcacttatcgcgaatgagaattgaagatgcagtccccattgacgacaccatgcctgaggaacagcttatggccatccgggaagtgaacaaaaaattcaaaagcagccagttttgggatgagatgcttgcagtagaggagaaacttccgtggtacgctgattatgtcaactacttggcatgtggtgaagagcctccgaatttgtcagggtacgaaagaaagaagttcttcaaagacataaatcgcttctactgggatgagccgtacctgtacactctctgcaaagataaaatctataagaggtgtgtctcagaagatgaaataaacggtatcttgcagcactgtcatggttctagctatggcggccattttgcaacgttcaagacagtatctaaaatcctacaagcaggattttggtggccaaccatgttcaaagacgctcaagagttcatttcaaagtgtgattcatgtcagagaaggggaaacatcagcagaagaaatgagataccccagaacccgattttggaggttgagattttcgacgtatggggaattgacttcatgggtccgtttccgtcctcgtatgggaataagtatatattggttgcagtagactatgtgtcaaaatgggtggaagcaatagccagtcctacgaacgatgctagagtcgtcctgaagttattcaagagcatcatcttcccaagatttggagttcctagaatagtcattagtgatggaggccgcactttgtcacaaagttttcgagagtctactgagaaagaatggggttaacacaaagtagcgactccttaccatcacagacaagtggccaggtgg

SEQ ID NO: 49840 - DNA, 877 bp, Arabidopsis thaliana
tcctcatccttcctccactacttcctcctctgcaattaacggtggtcgtcgtcacatcagctcttcttccgctttaacgacgccgttttacagcggcagagcaattccttcgaaatgggaagatgctgagcggtggatttgtagccctgtgtcgacttacccacaaggtgtttgtttaaattcctcagtgagttctgaacagagaaggcagaaatctaaaagtggtccgattgttcctcctacgttgcctcatccgcatcctacgtcttcttcgtcggcgactgggtgttatcactattctccgaggatgatgatgcggtctatggatgctcctcctaagggtttaatggttgctggttctccgttttctactggagttttggaggcggatagggtttttagaggaagtgtcggtggtggtggttgtgatggctatggtcgtggacctggccatggacatagccggagctgggttgatttgatgagtgaagaaacttcttcacttagctccaaaactgatacaggtaactatagtttctttctctctctctctctcttatcttcttaatgaatctgaaattagacctctttgaatcttgcttttggcaaattgaatcacagaatcatgaaaagattcaagcttgagctggttcttatgaaaccatgttcaaagatctaagctatgtttgattctgaaatttgtgtagaggagaaagcagagatgacgacggcgatgcaatctccggtggtatcaagaagagatatggctactcagatgagtccagaagagacgagtcctaataacaataaccagtctccaccattggttgtctctgtgattgagcacctccttgtagaggtgaagtgagagaagtga

SEQ ID NO: 49841 - DNA, 531 bp, Arabidopsis thaliana
cctcggagtcttcatttaccagctccaacctcctccccacatgcttctttcctcgagtgatatctgccttgttcctcgagaattcccttgcaggggacttactcgacctttgcgaacgagtatttccagctggagagctgaaggtctcttcttctagcatcacttcctcctcttggctcgattcactatgatcgatctcgaaacttgcttgttctctcctgttcgaccccaagggtgatagttcagaaggtcctcgaggtgttgcatgcgaagaaggtgttgggtacctcttcgatggggagagagctttgttccgaatccttgacaaaagcgagcgcctgttcatcatcaagaacaaaggtggaagacactcaaaaccaaaattcagtagattcggagattgaatgatggaggacacaaatgaatttgtgaaaagtttttcataagacagggaagtgaaggagataaagagagaattgtaagacttcgagaatgctttggtatgggagggggagacatgaggttgttgag

SEQ ID NO: 49842 - DNA, 499 bp, Arabidopsis thaliana columbia
tatgtgtagcgaaaggaaatcaagaattggaaacggatgatcaaatgttgcttggtgtgtcttggttttattgtcattgtgattgtgtaggtatgataatgttcgtaataccaaagaacaaaagcttgttcttggttactagtgcaacgttttgttctttgtctttgtgtttgtattttactatcgtaatgaaaatgagtgtgatgtttttctagatcatgtgtttgcatacaagaagaaccaaacaacaaaaacataggttatcttcttcaaagtttaacaagaagcaaacaacaagagaagtgcttaagttcaaacaaccaaaaaaccctgaggcaaagcttaagtttttgacaaaaaaaaacgcaaatgtcacagaaatactacaattagagctgagatgaacaattaaaccatgattctaacccagcaagtctttgttcttgggcttgcgcttgtggttgagattgtgctcgtgcatctgatctaacatgagcac

SEQ ID NO: 49843 - DNA, 389 bp, Arabidopsis thaliana columbia
cgcaatataacaatcccaaaccctaagaatgctaatcaaacaaacaatcgaggaaagaaaagcacaatttaagctcaaacaagttgggagagagggttttagtaaagttacatagagaaaccagatcttgaggaatctgaggtcatttcggtaccgagaatctttcttataagttgagatacaatcaaatagaagcttatcgagatcgtatccggaatttttaccagcgtatagatcctccatcgaatttttaatctccctgtgaaaaccccaaaatacaacatcggaaaattagaatccattttgacacatatagcacaattagttagatgagaaggaaggataaagcatgagttacataagccacgggaagagcgggtctccggcgg

SEQ ID NO: 49844 - DNA, 543 bp, Arabidopsis thaliana columbia
attaaaaaaatgtagaaagagtgattgttcaagttcttattaattatatcctcctattttagttgttatgttaaattaattactaattatgtattacttattttataaagtataggtggcaagctcttatgtgctgatgtgccaagttgtgggagaggagtaaccttcctttcatatatacgatttgtttctacatgttatggttcgtctgaagagctttatatctcactaggaaaaaataatttgtgagtttggatttaattagcgaaccatatttctacatttttataggtgcttgtgcttagctgcttgtaatatgtgtcaagacagaggaggagaaaaaggataatgggcttccaaagattgagggtgttaacggcatggaagaagattagacgttggaaaagattaccatagcaatgaacaaattaacccaagaacgaactacatatggagagggtcacatatgcgtttgaaggagaaagcttgggatagtaagaatggtttggtgtatgagtaaattgcttcacatataatagtttt

SEQ ID NO: 49845 - DNA, 574 bp, Arabidopsis thaliana columbia
ttgagtctttttgttagttttcgagtctttttagagtcttttcagttattccatgcagtgggacaacaatggagatgaggagacattttggagcaaaagctaaggaaaaggaagctaaggacgatttcagttcaagattcagcgagagtgtcgatcgacacactcctggtgtcgatcgacacctgtttcggcccagagaagtccattacgctttcaagtttacagaagtggaaatttgccccaggagactttcctatttgcattattagtccttgggtgattattaggtcatttatatagttttagaggtcattatttagacctataaagttcttttcatccctattttcatagagacataagctattcatccctattttcagagatccatccagttttcaatacaattaagagatcatttcatactcttaccttatttgttgtgtttatgctttgttactcaattatgttgcttgtttcaatcattatgtcttagtagtttgcttgttaggtttaggatttttcattaggattcatatggtttagtagatcgcccctgttaggttactataga

SEQ ID NO: 49846 - DNA, 553 bp, Arabidopsis thaliana
  unsure (1)..(553): unsure at all n locations
aatatattatctcgtttaaccaaatgatttttaaatcgagaaaacaaatcgaaacatgtattcaatcaaaaaactcaaaagaatacaaaataaaaaaacaatgatgccatgaaatactcaaagaattacactagctaatgaatggataaaatgatagatgattcttacttttgattcttgattttgattttcatcagtttgtgtggatgctataattaaaagaatagggttataatatattgattagggttttctaataagaataagatatataaatggttagattattttaattatagtgattagggtttgggtggaagccagaattattttaattaattaagaatttttttttttaacctaaccgctaccgcccgcaaccgcaaacgcttgcgggaaggagcttttgaaatctggctatttcgaatggttcaaaacggtatttagcggtttttatgattggtgtcaatcgctaacaaccgccaccatccgcaaangctgcgtttcggatgcaaagggagaacgaacaagcccttaattaagtcatgtgatg

SEQ ID NO: 49847 - DNA, 552 bp, Arabidopsis thaliana columbia
  unsure (1)..(552): unsure at all n locations
cctcgagaattgaaacttgaaacttgaaagtttgaaactaatcagagattgagatcaataatcgaaacctagaattgaaattgcatgaacgtacttacctcagaatgatttcgcgattgagctgtctgtggtgggtataacgggaacgtcggtgacggtgaggtcgccgagagtgtttcgacaagggtttccagtttgatagaatatggttcaaagagaatttaagaagagaagccgatattcaagggatttataagcacaaaaggtaattagtggtgtataggtgtataggttataagcacaagaatcgggtgtatgggtacccggaatgggtaatgggtaataccctacccgaacccgaacccacggattaaccaaaaccaaacccaatgaggtaatatccccttaccctaacccgccccaacccagctttttcggttcgggtatcgatttgggtattaggtccggttattatgcccaggcctagttgaagcaagatcattgtgatgtggatggatggtctattcacaaggagancaacatgagtgtgag

SEQ ID NO: 49848 - DNA, 730 bp, Arabidopsis thaliana
ccccgaaacaatgaacccttgtattgtacaagttgtatctatcattcacttagtaatatgggtaatgggttcactggtccataataagacataatcgacacacacgtcatacatttagttccttcttagcataaatagtaaaaacatacaaaatgttctgtttctagaaaataaataagctatgctaaaagtgctatgaaactatctaccactaacgatagagcttgaagaaacattggagaaagacgaaaaagtattcgagctcgaggctctatcagacgaaacataacctacaacattcgatttatgatcgtctctcgaagaatccgagaatccccaattttcatcaatctgtggaacattctcttcaccattcaaatatctaagcaccattctcatcgatggcctaaattttggtttctgatggcaacatagtaaccccacaacaagagctagtttagcctctctgccattgaaactagacccgagattctgatccacgacgcaaaggattccaccattagtatgaaattccattacccaatcagctaagaagaagttctctgcattcgttggtttattcccacacactatttctaacaacaaaacgccaaacgcgaaaacgtcagacgcggttgagcctttaccgttacgtgtgagctcaggcgccatgtaccctaaagtgccaacgattttcgtggtctgcgttaacgttccgcgttcataaagc

SEQ ID NO: 49849 - DNA, 537 bp, Arabidopsis thaliana
ttcttactttcttgttattttttatttgttttggttgtgtttgtggttctccggaagaaaggagtaacgtgcaggtagagtaaaaattcaaaacttttactccactgatggcctagagatcgagtatagtggtcgagtatgagtgatgtttaaaaacctaaaaaaaaattaaatcatcattttactcgaccaacagaagctacaaagtcttccagggagtctttcaagtttacagaggattgcgggatttcctggagtttttctagtgaacagagaatacacagaagagacaagaagacattctgggacccgccgctgacgcccatgtcctccatgcaacagaccaaaggacaggaaatctctcctcatctcttctcctccactcgacgtcaacaccatcactcgacctccatccctcttaactcgacctcatcacctcgttttctcctccacaaccccataaactcgacccatcactctcattcatcaccaccaacaaacaaaactctaaaccactcgaccccatacctcttgaat

SEQ ID NO: 49850 - DNA, 950 bp, Arabidopsis thaliana
acagcgttgcgttttgaatatattatccattcatcaaaacattacaaaggtttggtaaaatatttgtttcaactacaactaaaccacccaacaaaacctcaagaggcatcaaaagttatgtcaatttaactaatctcagtcaatcttcactgaggagtagatctttctaacgtaaccacaaacatgcgtagaaaccgattgagccggttagcacgaaaaacgagtaagagataatgatcatgtacccgaagtagagcactcctgataccagttttgagatctcaagctttgtgaagaagtagaagacggagtagaggaagaggtaaagtgaagatgagcctgatgtgaggtatgctctccaacaccaattgtagtcttcactgcaaagctggaagtagcagagaacaatggtgatctcggcgcaggtgaccataaggatcacaaagacgaggaagaggaaaccgaagatgtagtagaactggttgagccagatggatgtgaggatgaagaagagctcgatgaagactgcaccgaacggtaagattcctccaatgaggattgagaaaattgggttcatgtaccaagcttgctccgggatttgacgtgggattttgttggttttcacggggtcatcgagcggtggcttcttgaatccgaggtaagcgccgacaaagacaagagggaccgagattccaaaccagaggaagatcagagcaaacattgttccaaagggaacagctccggatgatttttgtcccagatgagagcgtttaggacaaagaagatggctgagacgactgcagggaacaagaaggctgttctgaaggcaattctcttccattctgttcctttgaacattttgtagagacgtgaagaggcgtaccggcaaagagtccatgaagcccagaggaggagcatggctgtcatagactccacggttggaaggtgat

SEQ ID NO: 49851 - DNA, 567 bp, Arabidopsis thaliana columbia
cacctcccttcacacccacgatctcaatatctttagtttgcttctcttcttcaacaatagaacatcaacatgatttcatacaaaaagcttccaaatcattttttctgattcctttttcctgcaacaatacaatactcttcgtgtctcaaagttcaaaaattggtggcctgagttttagttcttaagcgttgtactacattttcctatttgctttgctccaaaatcttacggatattcggatttttcgaattaaatcaaatcgaatagcgtgtcgaagcggattgaacgaatattttgcccaggcctaatacacgtatccaaattcgcaaatgttacacaatagctacgtgtggtccaaaaaaaggatcaacatcgttgttgtatattatgtgctgatcctacataaagagcaaatgtccaaatagtcataaatggaattcgccaattgtgaacaactctttggcaatattcttagttgttaacaaatgtttcatcaaccatatctaacacaaaactttaaaccggatgatacaaaatatatagttataatacagtgagagtagtaat

SEQ ID NO: 49852 - DNA, 864 bp, Arabidopsis thaliana columbia
gggtcaaccaatacaactgagttcatttgtatttgtattatattatttgcaagtgtgatgtactattttaaacttcgacaactgttttatgttttcgtatttgtattaaatatgtgtaagtttattgaattctttgcaagtttaatgtatttttttaagttcaactgagacaactgatatatgtatctgtattttagggttaacaaaatgattaaataattctctctattttcagctattaacaacaactaaacattgaataaatctaaaatatgacactacaacattgttattagacaacttgatcataaactggtttcctaataaataacctatgtataacaaggaatatttagttcatgattgtccaatgtacatacattatatatgaaaacagatatttcttaaatatgtttctatcaaaacttattaaaagccattaatatgttaaaacttatgggaccaactaaaaaaataagttggtttttgagattcagcttcaaaaacacaaaatttagaatagttcaactgtttgtgaatccggccaactgtacatatacatacaactatgtatattctgaatattctaataaataatattttttaaaaatagaccccatgacttgcgttcacactacgattattgcgttcacactacgattattgcgttcacacgacaatagcgctttcgaggcacccttactctatctctctttctctctcgctcttctatttcactcttctctcactttcttcctttctctctctctctcgttcttctctctttctcaacatcgccgacgacaacaactgaaattagggttccagccgccgtcgatgacacaactaacaaggtatgatata

SEQ ID NO: 49853 - DNA, 719 bp, Arabidopsis thaliana
atgttatacgtttttgtgtattatgtcttaccttgtggaactgttctttcctgaacaggtaccaagtatgatttagatatcaagtctccaaataaatctgggcaaaatttcaagtcagcggaagatatgatagatatgtacaaagaaatttgtaatggtatgtctggctcgtctgaacaatattttttgtgtctatcttagtactcttgcagtattgtaacgaccagattctctgtttggtctccttgtgggtttagattatccaattgtgtctatagaagacccttttgacaaggaggactgggaacacaccaagtatttttcgagtcttggaatatgtcaggtccaactcggttcccctactattaacggttcacatagattttgtgttctttcagatcacactgtcttctgattcttttctcagagtcaaatatctaaagagagagacccttaaatcttcttgtacaatcattttccttgtctaaatactcagtgttaaactcttgtaggtggtaggtgacgatttgttgatgtcaaattcaaaacgagttgagcgtgccatacaggagtcttcttgtaatgctcttcttctcaaggtatttcgtccgtcctattttgtttatgactatgtattacctgtgcacatattgtatgtttactgcctaagaacgacacagacatcatgtgcatacggtgatacaggtgaatcagattgg

SEQ ID NO: 49854 - DNA, 1134 bp, Arabidopsis thaliana columbia
ggaaaatagcatatgttaattgatagaaaagggtacggagaagatagtaggtagaaaagaaacaatgagaaagtttgaagaagggaaaaagaaacttgctatcttgggactcgaagtgcacgcatgtatttactaaattaaagtcaattactaattactaaatctttatgaaacaaccatataacgttataaactagcatgagtattactaggacgtgtgtaaatctttattgtcactaagtgtagtagatatgtaagatgttctaccggacgtgtgtaaattggtgtaccaggaggttttgctattggaaataaacctattgacatgttttggtccatggcccaaattaagaagtagccaatggcaaaaaacctatgggtagtccaaaaaatgagggataaattattcatctaaatatatttaatcattatatgtaaactgtgttatacatctacatctcatagtcttttgaatctattgattaagatcatcgatcgattttaatatattactgattaggttaaatgttgtatagttaatatgtgttgttggtttgattagtatgatttttgataccaataacagctttaaatctctgggcaaatgagagtccattagacaaaacatagtatggaaaggatcaaataaatggacaagatcggcaatcaaggataaaagtttgtctcctttaatgtctaacggtgaattacaaaatgtatgtagagagagatagagtgatgaagcatagaatcaagatgataaacattttggttttgtggggagattgatcgcgttggaaaaagagatggtcgtgatccaggacagcacttgcgttggtggcctcatctctatgtcggctcggcttcagaaacatattacttgggaaccccaaatctttatttaattaattgaactaacgtatagttaactaatggatttttacaagaaatagtaataattgacgaaaataaatattatgatgttgccatcttggatgtttaatttttatgttcatgtaatgttacttgtttacttcatgcatccctagctatgtgcaaattcttattcttgcctttaataggtgcttaccatgataaagtgactgagaaattaataaatttatcgtaaattta

SEQ ID NO: 49855 - DNA, 759 bp, Arabidopsis thaliana
atcccaatatccttaggattcactccggttttctcaagcactgcgtctatagctccaaacataaccgtctcggcttctttccttgcttcagacatacaaggattaggcgggacacgtaagagagcctccgggaagtaagtcttttgtccaagaccggaacgttcgaggatcttttgttggaaagcgaggttgtcttctgtgaagataccgacacgctgagaccggtccatgaacgtttctcgtgtgcatattagagaagagtcgggtttgtaacaagcgaaatcgaggagaaagattctgcgaggacgagttgtgaagtagagggtggttagaaagataagaagagcggcgaagagagtgctagagatcaaacataaaatcgagttcttcgatacaaacatagtttaaccaaaacagagtactttatctttcttttttcttggttcaaagttcaaacagagtagtttaaccaaattttaaaacaatattaaaatttggaaaatttgattaccacatgttgtgcgcttataaccatgtcgtattttttataaagttcaaaatctcatggctaaggaagtaaggatcgtaaaacttataaccatattgcatttaaatattataaccttgtttattcatcccgtaattcatactactttgttggaagataatgcattttttaattcatactatttccaaatccaataaacctattaagagctccacatgccattaattggcaaacacaattactcttggatc

SEQ ID NO: 49856 - DNA, 621 bp, Arabidopsis thaliana
tataatatgtcttctgcatgtagtagtccatactgcaatcatgaaaaaaatcatatttgcattaccgatcactattatatgaattccagttcctatataagccgcgatcgggtttttgatgataaaatcgactcttgttttgattctcaaacatacattagtagcatagaagacttgagtagtcttgtttttatcgaccagaaaagaagattatacctataacgctgctcggttgaactagttatctccatggtttcaccggtaacaagatgttctacagcagttgcaagtaatgctacaacctacaaaaaaagagacacaatgaagatgtatggcttcgaagaagtgataattaattctgaagacagatgtcattgattctagattgtatatcacgggagattcaatatagcctgtcaaccacagtatcttataaaaagtaaagatttcttcgaaaagtttaaaataccagggtcacgtttattagtttcttttacctctgtgttctttaaagcagcgagagccccacaagcccgggagagcaagaagtctcctgctaataccgacatctacaacatgaagccaatggtgatcttcatatccaaattgcagcacaatcgc

SEQ ID NO: 49857 - DNA, 755 bp, Arabidopsis thaliana
tggccttgtaaactactagttcggaagctcagtcaaatagtctcatgcctgtttaagaagctacgattacacagatccgagcatgaaagtagcgaaggtgaacacagctgtacttctcagcgcaagacatcttatcaacagctcttgattcaaagttaaacctagttgatttattttttttgtcaaaaaaaagtaaaaaataaaaaataatttggacgacatctagcataattttatacacagatcattcctacgatctactttgtgtaaatgtgagattcgacaattaacaagcataaagaaaattccaaagcaaaacaagagtcaatcatgaagaagaaaatgggtctcttcaataaactgcataagtaaattcaagatgcactacaatgaagaaagtgaaaggtcaagacttttaattgaaacacagcaacaaaagtaaaaaaccaaacaaaacttgttctactgattctcttaatcctcctcttcgatgacctttgtgccaagaccactgagtccttctgcagggatttcagcaacagtgacaagggagaagaactcttccttcgcatcttcatcgtcgtttctcttacgtgcaacacgaaccctgatcctccttgatggacctctgattcccttgctccagatttgcttgttcaacctcacgtctaccctaacgtccttagtccccatagctttctctgcgaacttcctgatttccttgatggctttcggtgccttcatcttaaaggtgc

SEQ ID NO: 49858 - DNA, 489 bp, Arabidopsis thaliana columbia
gaataagtactcaatacataagcaagacataaatacatcgtcattgaagtcactgtcaaactcatcagcaacctcacgttctgcttcatattcatcatcatgttcttcctgcagataacaaaagtaaagagatacataaatgtcagcaaacacacgaaagtttctgcgatagtatcttgtctacaaatctgatttttttccattatatattttgacatctagtctaccttaacaaatcattaacatctctttaagagagtaagctatatataaaacaaaacaaacctctttaagagcttcttgattccaaaactgttcatcttcttctacttcgtcatcaagcaacttggtcatcctgaaaaaaaacagaaaactgatgaataaagcttccacaagagagtttctgatacatctcaataacagtgagacaaaaccacaatctgtcaggtgaacacattcatcaggtaaaagcttaagctcaagtaattc

SEQ ID NO: 49859 - DNA, 591 bp, Arabidopsis thaliana
agggaccaggttttttggcacttcaggcacaagtatggaagctaaaacttacgcggaactatatgcatttcgcgtggcaatgtatctttggttatcttgccacttgccaaagatagacttattgtcatatgggaacaaataaaagatgtccccgttgtggagaagcagatgagacaattaaccatcttcttttccattgtccaccctcgaaacaaatttgagcattatcgcctattccttgctcagggaatgtcttccctagaaattccctcttctataatttcgattttctcttttggcgtggctgagaatttggaataggagaagaggtgctagaactctttccatggatactttgatatatctagaaaagtatgaaccgttttgtttttgaaaacataagggaacctcctcctgaaactttagctttggcacttcaagaggcagctgtttggaaacaagcatctcaaaaagaagatgatccattcgtcctaccccgttcgtaggttcttctcaactccctccctctttgctgtctgactgtcacttgatgcttctggcatgtagatgcactatgagcagcatggttgg

SEQ ID NO: 49860 - DNA, 900 bp, Arabidopsis thaliana
tcgaactcaaatcaatgaggaagacatcggagacatccgtggcgtgactgagtcggcatgcgacttggaggagagtgacggtcggaaacgacgacgtattggagtgttgtggcttccattcggcgtctaaggcgatgatcgtagaacgagtgaaagaccatttcaggtgagtgaactcggacgagtcggtggatgaaactagatagatctttagattggtctccatcgttcaaagagcaaaatcaatttagttgaaagttacattgaaggagagtcttatgtcggttttggtttgtccggtgggataatcaaattgaaccgaaccgaacaaccaaaatatatgaaccgatctaatcctaatttctcaaaatcggttagataaaaccaaaataaaccagtctgcaaatcgggaaaccgtaacagtggcgccaaattaaaattcccacgggaataatcctggttgaatcccagaggcgccgaacttcttctactcaacctcggctagatctcacatttataatctctcactctctctctttctctggtaaatcaataagtgtaagaatggtggctgtgaggcgaaggagaacacaagcgtcaaaccctagatccgaaccaccgcaacacatgtcggatcatgattccgattccgattgggatacagtctgcgaagaatgcagttccggtaaacaaccagcaaagctgcttctttgcgacaaatgcgataaagggtttcatcttttctgtctcagaccgatcctcgtttcagttccaaaggctcttggttctgccttcttggtcaaacatcagatcctaaatgtagctttttactataccacatgactctaattcaaagcttcttcttttgattaggatatgtttattggtgactttagattt

SEQ ID NO: 49861 - DNA, 1626 bp, Arabidopsis thaliana
gttgctgcgacgtagctgtcgaatctccatagccaaccggcgaaccttctcaccaatattgcaaaagatatcaataccatccctcaccaatattcctatatccaatgaatatgagtttatgtacctgtgcagctatagcatcagaaacatcagaatctccctcagacccttctccagatttctccattcccttcaccaaactctatcgaaagcacaaatcaattagtcaaaaataaaaaaatcaaggagagaaacaaaaaaaaaaatgcatagaatcaaaaaagtacctgcaattcacccaacaaatccgacaattttccattcttcatcatgatcgtaccagtgtaaccttgattccatcaaatcgaaaaacgtatcaggaggatatacagatcccaattagcagtaagtaaacgagcgagttagattgagcagagaaatcaaagtgaagtacctgctccggctaagagaaagatcctggataagccaactccggcctgcatcgccatagctccgactatttttacaccgccgccgacgacttgtcgagctttgtctcaaaaatcgaatttaatttaggtattaagaagacgaactcatggtttatttttcttattgcattttttttttaaacgtgctagtgcaatttacttggaaacgacgtcgtctcgaaactcaatttcaaccgcctcaactcgcggcgagaaaagccacatcgccggtgattgacttgaacattacgtaattttagtgtcgccacgtggcaaattccttttttgtttttaacagacgtaatcatattgataatcttgttaaatattttttttagtaatcataatttaataaagtttatctcttttaagtttatgtaatcaaataaatgtcggaatttttttctgctaagaaacaagttaaatgcaatggtttagaattggattgtaacagaccaaaaatggatcataaatacctgaaaaagtctaatctcaaataataatttctatgttaacataaacaaaaatggtttaatgtggttatgggagcttaagagtgtgaccatctatccattttattgctcataatccttcttttcttgttagccttgttctttgcagctaacttgagtttcttctttgcatttctctcaggatgtatcaccgccattagcttctcctctcgtttcctcttctcttttttcgcttccttactctttttgatttcgccttaaacttgcacaaacatttgactgcctaagctcttgtctcttatactattagattgtatatagtattccggtttgattagattggtttagctatttagagattgtacattggtttagatggtttagagtaattgtatatatactctcattgtaacacatttattcttcgaggaaatagaaaatcattctacaattctctttgttcatgatttctaatatggtatcagagcatttcctcacacaaatctggtgatttcaccatcgtttcttcaatttcttcttaatcacaccttttctgatcttctttcttctccgattgtctttccgcgaccttggatttgaagaaaaatggtgaagaagggaggaaaaatgaagactcgcggttctacacctgatgatgaagg

SEQ ID NO: 49862 - DNA, 976 bp, Arabidopsis thaliana columbia
cattgagaaattacctgcctgtgatacggaagcgcgtttccaatgaagaagggggccgtgagaaattgaaaaagggaaataaaaagttggatttggatgaggagtttcctggtggagaaatttacagtgatgagataccttcgccaacatctaactggaaagatacagatgactttgattcaggggacatcattccaatcattgcagacaaatctactactataattcccaacaggaggcactcgaacgatgactggtgttctttctgtgagttcctcagaaaccgtatacccccgttgaatccctttaaatgtagtgccaatgatgtcattgattttcttcgcacacggcaggttttaggcagcactgaggctctcgttgaccgcctcattttcagtagtgaggcatttggcataaaacctgaggaaaacccttttcgcagccaagctgtaacatcgtacttgaaggcggccagggatatgacacgagaaaaagaatgcatacttgtgttttcgtgccacgacaaccttgatgtagatgaaacatctttcattgaagccatctcaaaagaattgcacaagcaggggttcatccctttgacatataatcttttgggcagagagaacctcgatgaggagatgttatacggatctagagtcggtatcatgatactttcaagtagttatgtttcttctagacagtccctggatcacctggttgcagttatggagcattggaaaacaacagaccttgtaattattcctatatattttaaagtaagactttcagacatttgtgggttgaaaggcaggtttgaagcagcgtttctgcagcttcatatgtctctccaggaagacagagttcagaaatggaaggcggctatgtctgaaatagtgtccatcggtggacatgaatggaccaaggggtatatttacttatctttgttgtccctttactattcaaagctagtttatta

SEQ ID NO: 49863 - DNA, 617 bp, Arabidopsis thaliana columbia
ttcggtaccctctagaggatcacaaatcccgccaagagtagcaaagaagcctgcaaaaccacgcaagatgcagagcacatggctattcgctatctcggtttaaggtttgcttgcaactttgagtttttgtagcttctgttataatgttgcagaatggtttagttgtttcatcttcactcttctctgtgtgtatgatttcatatcatcttattctgctcggcattgctccagagcatattcagcagctgacctgaagaagaagctcataggaaagaaatatcctattgaagtcgttgacaaagtgatcgatgatttccagattcggtaaggttcctcttgatttcttttcaatcaagatccatggcatcatgtgtttgttttccttgatgcatcaggcagggtctaggttacttttcttgtaacattatccgctttaccactgatataaaaaccgagtaagaaaatgtctcactttcaactttttgttcgtgtgtttcagaggttttgtcaatgatagcttgtacgcggagtcattcactcgatctagatggtcttcttaagttggggacaaggcggacaaacaagtaagaattgcgatcacatttacttttctgtga

SEQ ID NO: 49864 - DNA, 811 bp, Arabidopsis thaliana
tatgcacatcacaacatttcccaaaagctcagggattaggagagaacagctttaattaagtacagtcttggtcttgtgtttgtcttatagatcagttacatcttgttttagtttgatatttgtctgtcttgtgtatatcttagtgttttgttgtctcaactttgatttttgacttgtctggattcagttgataccaatttggcaggtgtaggaactgctgattttgttggtgccaactttacacctcatgtactgatcgtcaacgccggagaggtatgtttttttctgaatgatcatatagtcttcaaatcgcttactatgatcagttattaagctaagctgttgacctgtggatttgtgtaggatgtgacgatgaagataatgacattctctcaacaaggatctcgtgctatctgcatcctttcagctaatggtcccatctccaatgttacgcttcgtcaatctatgacatccggtggtactctaacttatgaggtccacatgctctcttctatcatccatcttctccattttcatatatatatataaagaatgcattctctgtatttggtttccttctaatgttttttgtcttattgtgagcagggtcgttttgagattctctctttgacgggttcgtttatgcaaaatgactctggaggaactcgaagtagagctggtggtatgagtgtttgccttgcaggaccagatggtcgtgtctttggtggaggatcgctggtctctttcttgctgctggtcgtgtccaggttcgtttaagtttctagatagtatgtggtctcagaacatgagt

SEQ ID NO: 49865 - DNA, 592 bp, Arabidopsis thaliana
tgtatatagactcttcagatcgcggaggcatcagatggacacgctgagtggtggagctcttgaatagttgctgcggcggcggatagttgcagtagtgggggggctgacgttgaggcggctgcatcagaggagcttgaggcgccgcgccaggactgaagtcgtactgctgaggcaacgacgctggtcttccaaccggtgtggaccctccggctctctgtgtaacgttgggggtcgtcttcctcttgcgtgaacattcacgaccggcgataggcatgttcgaagaaagagaagacaacgaagaaagagaagatgattcgaagtagaagaagatctaatgaagagaagaggcgaagaagaagtttcagaagaagatcgaagaagaagaacttgaagaagaagatcgaattagatcgaagaagttcgaagaagaagaagttgaagaagatagatcgaagaggttttgtttggatgaaatgagaagtgaatcgatcgaattagggttttctttatacacgtagtcgcaatgtagtcgtattttagtcctaattttcttggatttgggcgcgaaataagaaagcccacacaaagcaaa

SEQ ID NO: 49866 - DNA, 547 bp, Arabidopsis thaliana columbia
ctcaaattacaattttcgagtttattggtttatgtacgtttagatttacacatgtacgtctatattgaaatttgtaatttttaatgtaaacccaagataactcgtcgactcattagttacatgtacgtcattagtaacacgtgtacgtctatataaacctatacgccgaattggagtgtatttattatgcctggtcacgtgtatcacaatactgtcttttgcgtcaatccaatcatatttattcctacatttatagtaactttaaagttataatgtaagtacagaaagaagtatggattacgaaacttcaaatttattgcttacatccgaataaaccattaaaccgagaaactttgtaaaccagaggataagcacaaattgaaacataactttatagaagcattacaagaacttgaacaacttcacgcatagaggataaaacgaaatagaaacataacggcattagaagaactaggaacataacttagacgataacattaaataacaacttcaaataactagtagatttatatgactagagcatttg

SEQ ID NO: 49867 - DNA, 683 bp, Arabidopsis thaliana columbia
  unsure (1)..(683): unsure at all n locations
tcttaacatatagatctgcgtcaaagtcgtagaagaacccagattcttattggggaatcgaaattctatgtcttcgtgaatcatctctaaatcggcaaattcgtattcatcaaagaggtaaccgccaatttgaatatgttaaagattccttatatttcaatagatttgattgttgttcctgtcttaaaacagctttatgtttgaacagagatctgcgtaaatgattgaaaagtaggcgatatttttgggtaagttttatatactctgagatatgtaaataatttataataagtttgacatctgataagtaggtttttgcgcctacttatttgctgaagtgtggtgtgttcagttcaattcccttaaacactaacatgtcgatgcaactataaagggtgtcaatcgagtcaactgttattgctagcaatcaagatgtgtacagaagcaactaagtcaagccaaattatagagatggttagtttctagtaacaattctaggtcaggattcgaacaacaaaaataagaacttaagagccctactcaatcattggatcgagtagaccaacatgcaacacatttaagaactaaaatgcaatcaataggtgatacaaatacgatgtaatcaaatcacaggtanatacaagtgaatcagggggtgaatcaaataaatctagagaatagaa

SEQ ID NO: 49868 - DNA, 536 bp, Arabidopsis thaliana
gttcatgacactactacagaatttactcttacacattcttcgacactcattctcgaaccttacaggttctctaaattttgtcccaactgtgggatagcctcaaatgccaaaatctacacattcaatgtaaaaatcacatcaattttaggttaagtctaataatgcatgagaatcaaagaatactataaattgttacctctaaaggaagaataaatccgggaaacatgtttgcacttttgcttttcctttcatgttgttcattatcaccttaatcccttccatgcacccatcaaatgtgaaacgaccccaaggaaatgtctcgcatgcatgcacatcatcaacaattttctgtaagaaacgatcaatattaccatcatcctttgacttcgcaacaatcaccttgcataaaaatagcaagatatccaacttctttctatccaccttctctctttctccacaatccttcatctcattcagcttctttccaacatctatgattttaacccaaatatatttttaacatcttttatgcaact

SEQ ID NO: 49869 - DNA, 425 bp, Arabidopsis thaliana columbia
taataaaaatatcgaatttttattttaaaaaaaacttaatgcgaaaagtacttcgaatcgattgggtgaatgtacggcatgatttatatccaatcatcccaccacctccttgcccttttctggatatgtcaattatcatttcttcaaggcaaaaaaaaaaaaaaaaacacttttcttcaaggcatctctatgttttcaagttttaatttatatacagtatcaatgtttaattctgatatcatattttcaagattttaactttcagaaacgacaaagatattatcactctagtggattcccataagattagattgaatttacgattttgcaacacgaatacggattttgccatttccattctctttaaacaactagtcagataaagtggagcaaatatattccccataataaaaaaacaacatgta

SEQ ID NO: 49870 - DNA, 474 bp, Arabidopsis thaliana
tgagaagatcttgactgtaatacttaattttgtcggaaagtggaccccctctagcattcataattcttaagtgcgtaagttataggtgtaaagtaaagagtaccactcacgccctaatcattgagacttttaagtcacaaattaaatttataggattaatacgaaatcaagtgtcacatctgctaaagtgattatattaattagtttagagaggttcttaacttatgaatcatgattgataaattttgaaataaaaactatgattgattttttgggccaaaatatgttatgatttttctttggtttatatatgctctctattgttttctcatggtatgcacatgtttaaaattgttgttacctttatgaaaacatgagtaaaacgttaactaatttgattttgatagtgttcgaatacaacccacaattccacaacgtaatgagagtgacgcacccaatgtatagaagttgcaa

SEQ ID NO: 49871 - DNA, 493 bp, Arabidopsis thaliana columbia
cggattaacccaactcacggtcatgtcaagggttgaaaagcctaaaccccgttcatgagggatggttcatgtgggtgatccgactaagggtctaaatccgtttggaacctaagttgggttgtctgtgagagctatcaacgtgacgtttccgggtttcccttggcttgtctggccacagagcgattcagaggggttacaattgttggtatttgagcatggttcatgatgctcatgggacaaacgtttctaaaagttttattgagtaaatgagtcgtaaaagcgattaggtaaaccggtatgtctcgagttagtcgagaatgggattaggtattaccattgttggttttgccattgtttggattggatcgagaatggatagccgtgtgatgcgatttttatttcgccttaggcttttacctgaaagaccacacgattactgcaagtgcacaatatatcagagtagtatttatggatcgaatccatgtggagtgta

SEQ ID NO: 49872 - DNA, 728 bp, Arabidopsis thaliana
ccctggtaaacatccaattccaacaaccatcattcacaactatgttccacaacaagccattctacaaaacatacaacagttacacaacacaggctaagaacacgagaataaaatagaggaagagaacataccactcggtttttggtttgggaatcggagacaagacacaacaccattgctccctgtttggcacggagagtgtcgcttgcagagccaccgccgagtcttcttgtagctccggcaacatcccaagaacttcctcttggaagttgttcccttgagacgacgcgtggctgtttgttggagcgtcagaatctggcgactgaggaggatcttgctgagctggcgctgttggcggcggattgtagtggacctcttcagatagaggcggaggagcttgatgttgtggttgagtcgttgagttttggaacagttgcagaggcggaggatagttgcggacgtggggggcagacgttgaagggccatgttgttaagccggctccgtcgcaggaacttgaaccgccggcgccggagtgaagttgtattggggaggcagattagcaggtcttgatccgccggcgccgtctctttgagtgacgttcggcgtcgtcttacgctttcgggagccacctcgaccggcgatatgcatgatagtcgactgagaagattgaagagaagaagaagcagacgacgtagcagatcgaagacgttgaatgtgggagatcgaa

SEQ ID NO: 49873 - DNA, 1062 bp, Arabidopsis thaliana
tcaacatatatcgcgtaatctttgacatcaggattcctttctctcctgtccaccctattatatctgcaggagtagtatctgcctgcgctgttctgttattgatgtaaatgttgaaaaccttctggttgatcttggaaagctggaattcgcagaaatggagtctcaaaatgtaggtgaagttcttatcgatttggaacatccatgtaagattggatttgaggttgatatctccgtttgggccttgagatcttgcggttttgtatatatcggctggagctatagacaccggcatgttctggtagttgatcctaaaattgttgcttgcttgaagtgtaacaccaagacccgcactaaagatgtaaggtgcatcattataccaagttcttgtcaacccaccggagtcttggcttccagggatgtcctgaccaccaacattaagtctaaacattgactgaagattcgcagtcttggcatccattgtttggtctgtgaaaccaacaagagccgccgtgtcaaacaattccggcatctgaatcacctcgataccgtttataaaggcaaatgcgtctcggtatttatctgaaggggtaaacttgatgctcaaaacatctttgtcagtgggtgcaagagagtattctttaaccagataagcttgagtcaaagcttgacacgtaatcgcggcgctgaaattgctcagtaaggtaacatcgttagcttccacagtgaaatacgagttggaaatgttgagaccggtgtatgttgatgggtagaaatataaccgaagcaaatgtcttttatctcctttaatcgggatttcataagttgctggagctgtaaagattctggctgtcatataaggaactgttgagagaagtgaagggtcttgatatgtagccgttgcgtgaattgagtttccagtctttaaaaactttgtatctggttccattttttcttatcttggtcagcagaagcttctgatgtcccgcagctcagagctaaatcttgtccgttagatctagttggaaaaaccaatagaaaggagagacatgtgaggaaaaagag

SEQ ID NO: 49874 - DNA, 614 bp, Arabidopsis thaliana columbia
cgcggccgtggtcgtggatttcagcgcggccgtgatcgtctctcgctcactttctctcttcctatctccctcacacgctctaaatctgctgggagagagtcttcttcttcagaacctccattgttgacgtgtcttcttccttttctatctcttcccaaattgcgtctccactccttggcttctccctttatttaccaatttgccattgctcaccggtccctgtattggtacgcttttgtcaattttagcccacaaaatctaaattataacttttcgttgactctgacctctctctcttatttcttttcaattgaaaattgtgactcaaactagcaaaaggacagacaatttcaagcgaaaatgcaactaccatcaatgtactggtactaagtagatttagttggtttggaattggtatgagagagattcaccacttgccctctctacttgacatttatttttttatttatgtgacagaaaaggactcttccaacttggacttgtgtcacactcgatgcccatcctgtgaggatccacgtcaattgggtaaacaaaaggccgcttaaggcccaacttgggtccatccataatatgatgaatagtgtcatcctctc

SEQ ID NO: 49875 - DNA, 527 bp, Arabidopsis thaliana columbia
  unsure (1)..(527): unsure at all n locations
ctatatgattcttgacccgatagtttaagatgttattgatcaagatataacatgagagaaaaatgatcaaataaatattttaacataaaaatataagatagcaacaatacataaactatttatgatatctatatatagatataactatatatttaaatatatatcgatagatacggatcgaagcggatattcgattatcttaaaaacattatttgttatttgcttcggtttttacgaatactacatttttctatttgatttggtccaaaatcttacggatattcgaatttttcgaatcaaatcaaatcgaataccgaatcgaagcggatcgaacgaatattttgctcncagcctcattaatgtctaaatgttataatgggaaatcaaaattaactcaaatttggaagagatcaaatatgttttcatttaattgcaaattgatatttgacctataaattaagtttttgttaatccgctaagttggagactgagatgcgtaagtttgtgatttggagcgagatttgtga

SEQ ID NO: 49876 - DNA, 582 bp, Arabidopsis thaliana columbia
agtcttgtgctggtctagatgttctcctggtttccatatgtagctttgacggtgcgtccaagtgtagactaaggaagatttccttgtttggcttcatttcgtgcggtacttcagaaggtagtccggcaagtagttcagcgaatagttctgccggtctgttagcaagtacatcagatatatgtacttgtgatatcttcgaatcattttcttggtaaatgattccttgatgacttgatgttgcctcgttaaaaacctttctaggtaaacccattgggacaaatcctagataagggaaaaagagtgcaactgtcatatccccacaatatggtgactcggctcgctggtcattgacccttcttaaatcatcattagtcttcttaggattaatttgctggtgaataattaaccatacgccttctgcttgattgagactccaattgggcaagggttctccaaaatgctccttagtaatcggtttgatagatgtaccggctggatttgtttgcttctggtttggtttgattagaatgtccgcatcacggatcagcaaaactaaattcatcctcgttttttttattcgta

SEQ ID NO: 49877 - DNA, 250 bp, Arabidopsis thaliana columbia
cattgttgcattgttacattcaagatatcagaaacttttaagatcaagttcttttacatttatcaagttactaactcatcatttcgtctgcttgtttttgtggtataggtactaatctttgtgcatgcaaactccatccaaaggttctgcacaatcaagacagtggactagattgacatcctctataactgcaacgacatgtttgtgttttaggggaattgaactgaatcacacattcaccataaggagc

SEQ ID NO: 49878 - DNA, 596 bp, Arabidopsis thaliana columbia
aggtattttgcaactatctttaggaacttgtctcttgaatttgaatatggattatactaataagaatagaggcagagagaaaataaatatgacgataaataagattaagattgtggtggtaagcatgacttttctgtttatagcgactcacatgatctgaattgattttgggtgggcgtattgaatttgagttatagaaactaatttgagttatagaaactcatgtgtcccgttttttgattgaaagaaatgaatgaagggaagtaagtttttggggctttagtaatggcatataagggagactgttggtgttggatccgcaccatgggctcgggaccggtcaaagattgccacgtaagtggtagaggcccaaaagatgaaaggcctatgggcttccttgagtaagagtataagtggggtgattgatctgcgaagtgagtgaacatcgaggtcaaaagttgcccggattggagagtcaagtgggctggaagatgaacccaagaagttcggagtctattcaaatttgaacatttgaatagtaaattcgaagactgaaacggatacatttaagagagaataattgcgtgtcaatgaga

SEQ ID NO: 49879 - DNA, 436 bp, Arabidopsis thaliana columbia
  unsure (1)..(436): unsure at all n locations
atcattttggatcattttagcttattatgcatacttaggcatctaggatcatctcgcatacgcattgcatgttttggtgtgttttcaggtgcagaaggggctaaaaaggactctactcgatccattcactcgatccaggcagctagagaagaggcatcagtttactcgacctctctactcgatcgaggcagctaaagaggaggatgcagtttacttgaccctcttactcgatcaaggcagccttagatgaagcagcagattgatatactcgcccctcctactcgatcctctactcgacccgtttactcgaccaagggtgaccaaactacaagacttgttgangctatcaaagcgtcttcggatcctcctcattcccactaaactagacatttgagcatacaaataggagaggaagaagcatctactcgaccaattg

SEQ ID NO: 49880 - DNA, 539 bp, Arabidopsis thaliana columbia
ctttttttgcacaaacaccatttatattaatttattggaaagatactctccgttagagagagccattcaggaaccgatgtgcttacatgggaaaaaagacaattacgtgccctaacttttttagctaaacaatttgcacgggtattagatctacgaggaagaaatctaatacaaaaataaggaaaaaaaacaaactaatgatcgataggaggccaattctgctgcgaaagtcagccaattcttttggttgtccaaaatagaaatcaaatctgagcaactagaagcaaaagtaccagatgtatcgccaatagagatcatgcattccattgcccataacaaggaatcaaattccgcatgtagcggtgatagactccgtcgcgcgctcttgagaccaagatggataattaattcttgtcgaacaaggatccatccatgcccgcttaaaggatcttcaacatgccaaaacgcatcgacttggcattcagagaacgaggtgtccggagccggagtcggaccccagacaggggtagaaaataggg

SEQ ID NO: 49881 - DNA, 544 bp, Arabidopsis thaliana
aaacttgctaaaagacataagaactaatgataaaaactttacttgttgttgctgaaactgctgctgcatgttattagcaccacgcctgaacccaacacgagggccaggctgagtttgcctttgaagagggaaaggcatcatgaagttaggcgggcctgcacctggacgcatcccaggcatgaactgaacttggtacccataccccataggctgtgaaggtaccaaaccttgaccgttatggcctatgaacattggatggtgtggtcctgacattggcccacctggtgggtgatgatggaacccagacatcggtgatggaactggtgacattgttccaggtgatctgatttgagtaaatagactctgaaacacgtgaaaacatcaagacagtttaagaactcagtgtcacaacacaacacagtacagagtttgatgttcaaagagtgagagggctaaaaagaacctgaaggtgagcctgtctttcttccttacgttgtgccaaagcaacactaaagaggtttccttcctatcatcttcacaccca

SEQ ID NO: 49882 - DNA, 560 bp, Arabidopsis thaliana columbia
aaaactccaaccaaagaaagaatgtccatactttttctctcaacttagcaataagtcccattatacagtgggatttaagattactgaaattttcaacacttagaaatcttgagtttttagtatactaccaattagaccaaaaaataactaaatttgttccacatgtgacagaggtatactagttattataatcaatatcattatcaatattaagcacaactacattcgaatgactaacagagattcctacgaaaaaacaataatctgaagcaatagaagtaagagaagcaactatacatttggaatcgaatagccgatatgggaatccgccacagattctggagaagaatttgcagtttgtcggagagagcttttgattgaagaaatcagacaaaagttttggaggagagatctcgaaccggaacaaaaagtttacattagtattgaaattagaactaatttgcggttcggtttcactgggctaaagaggaaagaaaaaaattcacgcgatggtgattttgaagacaactgcgttgataaaaacagcatgatttcaaaag

SEQ ID NO: 49883 - DNA, 566 bp, Arabidopsis thaliana
actctaggccagtgtgctctaaaggttgctggagctgaggaagaaaaacaagaactagttgaagttgttgagttcttagaagatccaagtatatttgtgctttttgcgtgctctgaaatgattacttgtcatttcagagcatttttgttaatcgcataagttttcttttgtatgccttgagtagtcccctattcaaggtatatttcccggaggtagtgagatgagcgattcacaatatatcacccccggaatcaaccatactaatccctagggaagtttcttctcatcagcctccaccaatgatgaagcctatgaataagaaaccagaagacaagttgtttggtgatcttgttgaactctccaagttcaagaaacccacttcaggacgagctggtagtatgtaaaatccacacttttctcccaaattatagatttcaaaaatgttgactttattttttgtttgacttcgataaagaacaccgaatttttacaataaatatcttttgtcacatataataacagttcagagttctcacttcttcttctcatgacttcacaatggagga

SEQ ID NO: 49884 - DNA, 422 bp, Arabidopsis thaliana columbia
aaaacattgcaagtctttaaaaccaaagtgtaacgcccgtttcccgagttagggagtaagcaagatcttacacacgccgaattcgaggacgaattcagtttaaggggggtagacttgaaacgaccacgtcccgcgttcataaagaggtgaggttgttttaggagaaaactagaccatggtcaagaaacggactaaaatacttagtcagaagaacgagaaagttcaaagctgaaccagctaggtgagctggacaagctaggatgaactagctagctaagctaggtgagctaaaccagctggaagactagctagctcagctaggtgagctgacagacagctcgactgagcctcggtgagctgatcgtgtactgacccagctgggtggtctggtcagctgacactcgagctggtggactgtggta

SEQ ID NO: 49885 - DNA, 895 bp, Arabidopsis thaliana
attctaagttggtgaccaatttcttgtttgatcgggagggtgtcgatcgacagtttagtggtgtcgatccacaccagcgcgcaaccgcgaatatcaacttcctctgaaaattgagtgtcgatcgacatagaaggagtgtcgatcgacagtgaagctcgattctgcaacttatcacatttgcagtcatcttcttcagctctatcaatcatatatatgttctcctcaggaaagaatcgttaatagggacatcatcattgatcctaatgtgtgacgaatgatttgctacaccattttcaactcctttcttatctttaacctcgatgtcaaattcctgaagaagcaaaattcatctcaaaagtcttggatgaatcgggatccgaaagaatcctgagtatccatcaagaaagcaatagtacttatgatttgctaacctctccaacatctgatcgataaattgtaaggggaaatggtctttccttgtggcagcattcagctttctgtaattgatgcacattctatggcttgtgatagtccgagttggaattatctcgtctttctcgttcttgactactgtaactcctcctttcttaggaactacatgaactggactaacccaactcatatttgaaatcggatagataatcgctgcttccgacagcttcataatctctttcttaaccacttctttcagattcgaattcaatcttctctgaagttcaattgaagacttagactcatcctcaaggtgaatcctatgcatgcaaacatcaggagagatatatgcaatgtcatcaagagaatagccaagagctttgcaatgattgcgcagcttgcttagcaataaggtgagttttttgggattaagagaagcattcacaataacaggataagtagc

SEQ ID NO: 49886 - DNA, 695 bp, Arabidopsis thaliana
cactatataagtctctgtgtgtgtgtgtgtgacaaagcttatgagacagttaaattagtgatgatccaaaaacatgtgtgtgggtcagtttcattaataccaatgagtacgcaaaccctatgatgtttcttgttttggtaccaaagaaagtgttcaaatcaattaaaagaactatttggaacacatctctatcacataaaagatcaaatctgacgtaacttaaatttagatttaccttttatacaattatttaattttgtataccatataaaactatttcgggaacatattaatgaacaagtcaaaagactacaagagtcaatctccatattaaatttaaaatttattttaaatttggaattataataataactttctatctttgggactttaaaaaaaaaaaaatttgggaacaaatttacaatattagaaaaatataattgtgaaaatatcataattaatcgattttgataatttaccatattttagaaactagaaaccgaaattgttacaaaacattaatattatgtaccagtactatacatacacacacacacacatatatatatatatatatatatatatatatatatattcgagttagattttcaaaatgattcgattttaactcaaacttatttaatacagtatacgatactgtaaattgggtacatgagatatttattagaaattat

SEQ ID NO: 49887 - DNA, 588 bp, Arabidopsis thaliana columbia
taacggccgccagtgtgctctaaagctttagatggcaggcttcgtggtaggcgatgtcaacagttgcgacgccgtaaccgtagacggccggggcaagcgtcaaggccgaggcaaggagaatctgtcgtgcgtcggttagataggattcttttagaataaatccaggatgagactcacgttggggagatgcatcttggctgtctggctggcttgatctgaccttgagtcaaccttgggctgggattgaggatgaagcaaatgagtgtgagtgagttggggttcctgcacatcgaaaggccacagacatggtgatctatttatgttttcgttggagacactgtcgacgcgtcgaaggatacaacagcccttgagttcccattgcggattcttgagcctgggtcgataggtataggaatgtaggagtgcgcttcatggaggggatacggttgaccctacccatgggtcaacctttagagggcggaaactagggaatgcgcagtataaaagctcgaaggaattttcaagaatgtcgcaggctcttaactgaagattcgcgttctgcttaaccaggggcgtgctcgttaatgc

SEQ ID NO: 49888 - DNA, 597 bp, Arabidopsis thaliana columbia
cttactgtatggaacatatgcacaatctaaaccctaaacccatctctcacaccaacctcaactcttcttcagtctacttggcaacagattacgcagccaaagtctcagactttacgttcctcagctccacaccacttgaccccatgaccaacgtatccagctttggcgcccttctacaagagatcatcaccggaaagatcccggatccagattctctgctccaggaagaaaccaaacccgttgcagacccgactctgaaaagctttcaagaggaggtcatggagagagtgtgggaagtggttaaagagtgtttgagtcagaaggtggaaatgaaggaagtggtggttaagctgagagagatcaccggaataacgccggaagcagcgttgcctagtcggtctccggcgtggtgggcggacgtggagattatatccaccgaaatgtagatatatcaattgcacagtaaactaatgtaccatcatcatctctgtactctctgcaaatttaaagtctgaagatgatttctttctttctttttttgggttttattttgggtcaatataagataaaatgtgtgagtttgaaacattaaagaga

SEQ ID NO: 49889 - DNA, 545 bp, Arabidopsis thaliana
caacatactcacaagaaaacagactatattggattgaaaacagaaaacagaaaactctaacttatgagaatctgcagaaacacttaccaattcatcttggatttcttgaaaagattttggcccagaatagtggactggaggaccgataccgttacggtcagagagacgagctttggaataggtccgactccttttctgtgctgcttctgtgtcccagtaagcacacattgttccccacagcgtttctccaatccatggaggctgctctcgagttgtccttgcggtgctaaccatgtccttcaagcgcctcttgacgatctcattgaagtaatactggactgtccttgttattaagggatcccagtgatgagttttctacaaaaaaaaggaagaagttaatgaaactacataaacttaacttgaacaagagcagatatagaggaagcttaccgcaaactttaaaaataatctttctcttttatcaactggcatacatgaccagttatagaagggagcatcgaatttttgtaagaaaattctagtga

SEQ ID NO: 49890 - DNA, 572 bp, Arabidopsis thaliana columbia
tgatgtacgataagagtcttgcaaactgcggtaaacttgcggcgtacaaactttctgcggcaaattttgcgtcggagttgcgagtccttggcaggttaggtcagcacgttttaaataatattcctgctttggttggtagttgaacttctctcgcaaattcgtagcaaaatagcttattcctcgcaagttcctcgcaaatccctcgcaatatgttatcggacatctataaataaccaacgtaacatgtacaaaatcttcatgttcaaaatacaacaggacacacctcgtcagaaccacctaagctaagagatacattccataccccaaaaatctaacataaacatatgaaaaaaaaacttacctgttttcagaaactttagagagaagtaagaagaattgcaaaataattgagagagtagaagtgagagaacaaaatagttaagtaaaattcaagttaaatagatattcaaagtaaaaaaaaaatacaaaaacttaagtttttatgaaattaaataaaataacaatcaaacgagtattgcttaactttaggaaaataagtttaataagatggg

SEQ ID NO: 49891 - DNA, 525 bp, Arabidopsis thaliana
gggtgaccttaatacttcttactttcagaaaatctgccggtctagagcaaatttcaacactatcaggtccttccttctcccttctggagctctcattgttgaccatttcgctatgagccatcacgcaatttcccattttatgtctatcttggcccctgattattcagcttcgcctactgtttggtcttcaagtgattggttcggctccctgaattcatttagatgctctctatctcagtctcaagctatgatagctcctccaagtgcttcagatattactgcagttctgctcaaactaaaccctagcaaggcgcctggtccggatgggctaacttccgggttctacaaacagcatggagctctcttggtcctgaggttactacttccataagccagttttttccgtgattcctttctgccctcctcaacaaatgccaccattctcactcttgtgccaaagcatcctggagcatctcaaattgttgactacgccaatctcctgcctcaacactctctacaaagtga

SEQ ID NO: 49892 - DNA, 605 bp, Arabidopsis thaliana columbia
  unsure (1)..(605): unsure at all n locations
caggatggttaattaattatcggtttagtagaattttggtttaaccaaattaaacaaaaaagccctagttccttcttcttataagttgaagccatcttcttcttttctcatatgtcgtgacctgaaaaccaaaagagaaagagagttgtttttaacttgaaaaagaaaaaaatgttaaagctttggtgaagggaggaagaggcagaatcgtcgaggtttggtagagatcagtttcgacctattaaatcgtgggcaaatgtatcaaaattttcagagattgcaaataagacctacagttacatgtgactttttgcaaattttaatttgagttagaattctaagagcatccacattggccatacctttgtagatgtctaaaaaatataagtaagattaaatttaaagacatcttctattttgggggtcaaaatgtctttccaaagacactattacacttttaaagacactccatctcttttttctattatgtttaatttaataacatccgcaaagtatcaccaatgaggatggtctaagagttgtatacgttnttgttagcgtgtctgtttcagtcgcgatttagaccagcgtgtgtttaaaggagg

SEQ ID NO: 49893 - DNA, 385 bp, Arabidopsis thaliana columbia
ggagtggcagttaatacattatattgtattaatatgttgagttatttttattgtcaaacattataggagttacactttaaagaataaatacacaataaattctgattattattaaagaaaaataaaatatcatattgtcaacaaacaaatattgtaatatattcatatatatatttccctcttgaagttattttagagagaaattatttggtctttgtctttgtaacatctgtattctaaaaagaatggattaatggagtttaagtcagtaattagagcggaattggtttgtttctaataagttgttaatcgggttggtctatgtaattagacctaaaggatggttaattaattatcggtttagtagaattttggtttacccaaa

SEQ ID NO: 49894 - DNA, 561 bp, Arabidopsis thaliana
ccttagcttaccagagatgctatcagtgaatcagcatctgcaacctcccgaatatagtgaacccctggcaagtgcccaccgattttatctgggaacctacaataaaaatccagagcaaatattcataatatcagtatacatggttgaaaaggcctaggttctctgatgttgtttatcaatcattgcaaaaaaaatgcgactttcactcaccttgaggctgtacaccctgtagcgataattagagatccatattttaactgcttccctgcgtctgtggtgagtgtttgcttttcaaaatcagctccagccactggatcttcatatattacctgtccaaacaaaatgcattagtaagacacaagagaagaccacaaattcaccgacgtacattccaagctgtacagttaatcaaaccaaagacacttcacttacattcatatattttagaaaacaaaactatgtatcagaagatgaattacctcaattcctttctccttataccaatctggtgtttgcctttctccaccacctccaacgcaagtatgaaatccctgcatatac

SEQ ID NO: 49895 - DNA, 992 bp, Arabidopsis thaliana columbia
tgaccgtgttaaccttgaatcactgcattgcttcttttatttggttaggacgggtaagacctccttccccatatgttggaagtgtgcagagtcctcgcggtttgcattttggaagccatccgtatcaccaaccccctacttataactaccaacaaggagtggtgtacccttatgggtgagttatgcaatttgaagctcagaacatttcgttgctattgtaaatctgctataacagacaagctttgatgagtgtatcagttctaatgttctacatgctagtccttcagtcactttgatcaagtggcatttaccaatcacatcatggacaatcatctagagattctattgcgttaggggttgtatcttctgccacttagggttcttgagtgtagcactatcatgtgacatgttgtgattggtaacttgcaggaatacaaaaatataattgcagaggatatgtggccgagctcaatttgttttggacaggcaaggtcatgaatgtttttggactttgatagggcaaaattacctagatttttggaatggacattttggagtggacttaggtttttcccccctagcttagcatctttctttcgtagcataacatattctagctgttttgtataagtgttactcttcttttcttaaagagtgtttagccaaaactttactcacctgtctctaatattagctgtgctttttggggttctctcagggttacaccatatggacctgactacatgtactcacagtctcaggtaggcgcttgaaattattgcagttccttcttaccttctttatgcattttaaactgttgtggctttagttataaactcatgtcttctcttcatggtgttgtagggtttctatggtccttacatgggtcaacagtaccttcaggtttatggagtacctggggcagttaactcaccgggttatcaatatgggcaactgagccatactattcctggtgctcacggttatacagc

SEQ ID NO: 49896 - DNA, 455 bp, Arabidopsis thaliana
gtgtgaggcttggactcataccctcatggtcccccataagcattttgatgggtagtttcagaaaatgaggtgacacggcaaaagcatcctccatctcagatctattcccttgaatggaaaccgtgccccaaagcggtatacaatctagttcataaacacttctccctttcaccagatgattactattttcatctggcaatctaatgacaacctccgaagtattggtatcctgatttacacccgcgataagaacttccgcggtgggaacctgctcaatgcttgattcgcctacgataatcgcggttgcaagaactcgcccgttatctatttccatagctgtattagacaagcttaattcagagcctgcatcaacaactaacaagccctcacttatgacagcactattatcctccacaacagacaatacatcgtcttcatcaaaaacattggaagac

SEQ ID NO: 49897 - DNA, 674 bp, Arabidopsis thaliana
ccataccttacattcccataaacacacacaagacatgaatcatgcctataacacccataattgtacttctctgctttcacagaccaagacaaccaaactccctatcacttattcatttcctctctaatcaaagttcaacttttttctacgacttgcaacgactttactcacttacattcaatgatcgaaacttgagttactttaactatataaatcagctaaactttgaaaagtcaacacattgacttactttgacgccatgtctgtgagcagtgttggtccaacaaggaggaggaagagtcactagagagtgagagaagtaaacgaaaacgtccatcaaataccaatcccagatggcgtaaccagcgttgtttccacatccttgtacccacttatcatcgacgtagcctcctttcatgtcatgacaaaccaagagcctaggtcgatccgacaacgcgccaatgtttcgacggagaggtacggaggaacggttaaagggataatgaaaggaatcgaagtaagagcgagacttcaagtcttgaagagttttgattgggaaagagattggtgtcgatggcttagtcggatcgaaaggtggaggacttggagctggtggtgccactgacatgacttcttcgttggatagagacggattcgattgttgaatcaatttg

SEQ ID NO: 49898 - DNA, 935 bp, Arabidopsis thaliana columbia
aattaaccaaaaaatatcaatttgtgtaatcttcttctttttcttcttcaattctctgtgtaaactcttaaggtttgatatttcattgttgatagagctgtttctacttctaagctttatcacatgagatttggattctcgttttatgaacgacgattcaattgctgtaacttgttcgattgaatttgagtgagatacagtttttctttatcagtgtagtttcttgaggattaatggtttaccattcaatctttttggatttttagtgaagaagaggaagaaagatattagtttaggtagagctattggtgaacattttcccgtccaatctgaaggaacagatacgaatttggtattgttggatagatctcacactgaggaatacacagaaacaaacgaatcttcgttacgaggtaaactccacccgcaaattctagttgaaagttggacaaaagtcacagtttcttaacccaaaataacaaagtatcagattttagattcaagttggcattttcgggaacagattccggttaactctaattacttaatgacaagtcgacggtggataccgatagagaaagtgttaggaaagccacaggacccttcatcgtcacaaggaaaggtataccctacctgccacgttgattgcttattgaggaagaatcacctcttttgttaaaactgcagaaaccctaatttgtctttgtgatgttttcttctgctgcaagtttcagattttgtctaggcatcttcaacatctttcttcaagtttgcgttctatttcgagttgccaaggtgagggcaggacctgtggaaacatagcatcacctttctacttttgtacttctgaagttcatttgtataggattagacattgggtgcagattgtcaaaatgttaggaattatattaaaatattataatacgctgtgtgtg

SEQ ID NO: 49899 - DNA, 593 bp, Arabidopsis thaliana columbia
cgaccgagctatctccaacgcgtactaacgatgcatctaagcgtcggaccgaaaacaaaattaagaaaaataattttaaaaagaataaaagactaagggcgaaacagaacaggaagtcagaattcccaatgacgccttcaacaaaagtactgtatcgcagcctcggagcccttccagggcaaatcactctatcgcaacctcggagaagctagcacgtcagtttcacttaatcgcgatgccggaggaatcaccccatcagaaccactcgatcaccactcgatcaccagaaggcctatctgctcgttctgcactcaaaccagacaagttgagaacgaagaagagaaaagaagccgaagcaaccaatcgatcaccacctcatgacatccattcgatcgcactcgatcacagggtcgctggaccattcaatctcgacttcactccatttgtattttcactttcagtacttgatattcagtttttgtttaagtctttcgtcatttctgttatcatgttttcaatcgttgctttgctattgtctttgattatgtctgagtagtgacccgtatttctgaggatgggatagatttgttgtg

SEQ ID NO: 49900 - DNA, 650 bp, Arabidopsis thaliana columbia
gtttttgttgaaaaggaggttctgattgcctgttgatcgagttcgcatacagtagaggtgtacctggatcaagaagacaacaagaaaaacacacagttagtaaccgaaaagaaaattgaaaaagagcttgatctaagcaagtctgaaatctcaaatgtaacaaacaaacacccaattggcaacggcgccaaattaataataggtttttattcaattaaaactaaagcactatcatgtcgttgtagtactgaaggttgtcaatccaaatgggtgtgatgctaacaatcaagatgtgatcagaagttactaagtcaagccaagcaataacaggttttggtgtgttctagcaatcccaagtgaacatgcagaaagcagaaaattaaacagaaacagtaaaacactcgaccaacacagctctttgcagagcactgggtgaggtcgagtgaaaggtcgagtaacagacagaaaataaaacacagatactcgactgcacagtctgttgccagacaactgggtggtcgagtatgaggtcgagtaaccagaaagaattacaaaaattaagcgacagataacaagatgcagtaaacaacagtagagcaaacaaagaattcaatcagataaagaattccaaggatggggtaattgagtag

SEQ ID NO: 49901 - DNA, 881 bp, Arabidopsis thaliana
cagagctcaccttattgctaagcaagctgcgcaatcatcgcaaagctcttggctcttctcttgatgacattgcatttatatctccggatgtatgcatgcataggatccaccttgaggatgaatctaagtcttcagttgaacatcagagaaggctgaatccaaatctgaaagaagtggttaagagagagattatgaaactgttggaagcagggattatctatcggatttcacatagcagtttggttagtccaaatcatgtagttcctaagaagggaggtgttacagtagtcaagaatgagaaagatgagctgattccaactcgaacaatcacaggccatcggatgtgcatcgattacagaaagctgaatgctgctactaggaaaaaccattttcccttaccatttatcgatcagatgttggagaggttagcaaatcattagtactattgcttttttgatggatacttaggattctttcagatcccgattcatccagacgaccaggagaaaacgactttcacttgcccctatggtacatttgcttatcggagaatgccctttagtctttgtaatgctcctgcaacattttatagaggtatgatgtctatcttcacaaacatgattgaggatatcatggaggttttcatggatgatttttcagtttatgaatcatcgtttgaggattgtttagagaatctctgcaaagtgttggcaagatgtgaggagaaacatctagttttgaattgggagaaatgccactttatggtgcaggatgggatagttctcggacacaggatttctaagcatggtatagaagttgatagagctaatatcaaagttatgacaagtcttcaagctcattacgaattcgagctcgtaccc

SEQ ID NO: 49902 - DNA, 635 bp, Arabidopsis thaliana
gtccatgtccctttatttgtgcatttgagattgtacttgggacaagttccgagttacaaagatgtgaaatggaattgttaatttatgcaaagttttgtttcttttgcagggagcaatgctgtttggtaagcggttagaagtaaacttctcaaagcatccaaatataacaccaggcacagactctcatgattatgtaaactctaacctgaaccgcttcaaccgcaatgctgcaaagaattaccgctattgctgctcccctacaaagatgattcacttatcgactcttcctcaagacgtgacagaggaggaagtgatgaaccatgtccaagaacacggtgcagtagtgaacacaaaagtgtttgagatgaacgggaaaaagcaagctctggtacagtttgagaacgaggaggaagctgcggaagcattggtatgcaagcacgcgacttctctaggcggatcaattatcagaatctccttctcccagctacagacgatttaaaatcacgaaagacctctctctctctctctctctttctctatctctctttcctctaataacattagggtttggtgaggattaatgaatgtatgttgcttttaacttaaaactctctgctctttgttctgttctctct

SEQ ID NO: 49903 - DNA, 834 bp, Arabidopsis thaliana
ctacgcaacttttctataagccatatgtcaaatatttccggttatttatgacatcttaatatatatatgacagttaaaaacaagcagattaaaaatatttatgtttaaaaagttcaaccaatcataataaagactggcgtgtggtaaatattaaataaaatattaaaataatatataatttttgggaaaaatgttatttaatacctcaactaacaaaaaatggccaaattaaccgtgaactcgtgaaatggccgttttaactctcaacaaaaagttgacttctgttttaacctttaagtttgcgttgactcggcctaattaaccaccgttaaaaatccttctaacagcgtaattgacagccgttatagaacatccgttaaggtgatacgacgacgttttgtgctatcaatacgacgacgttttgtgctatcaatagaacatccgttaaggtgatacgacgatcatttcgagctgcctctactctatcatcatcttcatcgtcagaggacaaaggatctggaatcttgtcttcatcccatatatcatctccgccgtcattgtcactagcttcttcttctccattagcctctggaaaatctctttccatgtctaagttaccatcttcttcgacacctaatccagcagtatcatcttcttctctattagtatctactgcatcatcaacctcatcgcagtcttcatctccttggactgcacagtcatcgtcttcatcaagagcaggaacttcagcctctaaatcctcctcttcttcatctctgatcgccttcgttacttcgtctaagtggagcacgactcaacgcctgattcaatgtg

SEQ ID NO: 49904 - DNA, 904 bp, Arabidopsis thaliana
tgaatattaactggtggcgtgttcgtgtgattatggacccagtcatcattggcggttccccataaaaacgcttttgtaatctcgataatgatatattaaagaatattaatatgtctgtaacctagccatgaagcttttataactcagccacttctaaatttattcagccaatacaagacgccgtcgtttgatttgtgctttttgtatcatacacgactatatagatttagtgctttagtgccccactaattgaagaaaagaagatggcgcaaagatctcttttccacgacgactctagagttgatgagaaaacgttttcagaaggaaatgaggtatttatcttgaccactgaatagtacaaatcgttagccacctaatgtggtggttttcctgtttgtgttaatgtaggagctcgattgtatggaaataaggatgagaatgaggtatggcgaaaacaggaggcgcgataagggcgttccgatcgagtgtgattgcaatgctaaggttgtcgttgtcacttctcttgatcctgttacaaccggaaaactttttttcagttgtccgtacgaaatatcggatgtaagcatcttttcttgagttaatattctttattttatttttttattttgtatccctatgaatcaacctactggtttttttataagggtcccggtcaaggatgcggtttcaagagatggtggactgttgcattgtgtgacgagtttgacatgataaaagaggagacgactgagatgaagaaggatttggaagcagccaataagcgcgtcgagtctcttgcggaaaagatctttcttatggaaaagaagtttgaaacgctagagaagaagtatgagagcctgaacaagtatctgtgatcttagaaagacgtgtttttctcaatttg

SEQ ID NO: 49905 - DNA, 925 bp, Arabidopsis thaliana
atcctttgactcgtggtattgtttgcgaaatcatctatgttgaatttggaagatctccgcttgcccatagttccgcgagataccttttaaggacgctgcaatccatggtcagatgcacggtcactctgtgtatatcacaatacaagctttcatctcggacccaagtgtttgacttttcttttccctgaaactgtttcttgacgttattgttgaacggttgtgaaccaaacttccttgatcctttgttctcctaaggttcgaacttcttcggcgggaaagtgactgccggttttgcttgcttattttttttcgcgaaactttcttttttgttctttgacttccatccaattgttcgctcggaataatgcatgttgaattgtatccggtttgcgaagtattaagtcttctttgaatcttgaatcatgccataatcctttccgcaaggctgataaagccgattgttgcgagatccttgggagcttcgaaagtacattcttgaacttggtaatgaaagcccaaagtgtttcgttcggcccttgagataaattccaaagatcagtgtctgaaatgcttttatccataagaatggaatattgtttcagaaacactgttgatagctcattgaagttgctgatctagcccgattccaacttggtgaaccacatcagtgcttgtccgcacagattttcagagaaaagcttgtagtatcctccatcttcgttggcttcattcaaatcgacccgtctagaagaaattagaaaagctgcgagatagcctttcagatcttccaagccgttgtacggttctaggttaagctttcgagaatctttgattctcaagctagcaatttgcaggacgaaaggtgttcgcctagcttctttgatgacccggttgatatccggttccgagcttgtacctgatggaa

SEQ ID NO: 49906 - DNA, 431 bp, Arabidopsis thaliana
cggagacagtgcgttcctgttaaacctagaagcaaacgccgccgcaccaacggccgtatctggtctatggagtctccatctcctctgctatccaccgctgttgccagaaggaagaagagagggagacagaaggtggatgcatcgtacggtggcgtagtccagcagcagcagctgaggcggtgctgcagccattgtggagtccagaagacgcctcaatggagaatgggtccattaggtgcgaagacactgtgtaatgcttgtgcgagtccggttatacgtcgggtcgacttttacccgaatatcgacccgcttgtagcccaacattcaccaacgagattcactctaactctcaccggaaagtgttggagcttacggctcatgaaagtggcggatccggctcgggtttaagccatttttttctatcttgaaat

SEQ ID NO: 49907 - DNA, 772 bp, Arabidopsis thaliana
gctaatcgctgtgacactcaacaagaaatttaacaatctccaactcaagataagctgttcttcttcaactacggcaatgccacaaagcatgccatttgggaaaagcggatccactcgtcacaaacttatgcatttcgatccgccttcaccaccaagacagtcttcatatgagccgagggaacaccatgctgcaccttcaccaccaagacaatcatccttcgaacctagagaaaaggaaaagaggagcaagttgcaaaagtgaagaagaacaaggaaatcagacgctggggcaagccaccgcaccatttgaggagccactcgatcagcaacccgaacaaagggtcaagcatccagctaatccaagttcagcataacccgtcccttggagtaatacaaaggagagtatggacgatttcgtctcctcctacttcacctgatcactgaggtaacaccacctcagtcattgtacataccattagcatttttatttttctttgtgtgttttgtgctttggtcttgaattctctttcagatttttattacacaagggactgtgtaatttaagtttgggggagggttcaagacatgtttaacattgtgttctcttttcttatttcaatttttgtatcatctaaggcatagaaaaaaaccataaaaattgtaaaaaatttcagaaaatgatttcatcaaaaacagagtgtcatgtagattgcattatcattttaggattgtatatagtgtgcttgcatttaggattgctcatttgcatagg

SEQ ID NO: 49908 - DNA, 597 bp, Arabidopsis thaliana
agatctaaggagatctccaaaagcaatgtcgtggacgatatggttgctagcaatggtatcctctttgagcctggggaacacccggaccatgttgttgtcatcaaggtaaatagagaaccggacagacactcaaaacctgtttctgttggcaatctgagatcccattgatccaatttgtgtgtttgttttgtagtatgtaccgtatgttgcggatagtaagcgagccatggacgagtacacatcagagatattcatgggagggaagaacacaattgtgatgcacaatacctgcgaggactctctcttagctgctccaatcatcttggatcttgttctcctcgcggagtcagcaccaggatccagttcaaatccgagggagaggttcgtcagttcacagtacatgttattttgggttctctgttttcactgaaccgcggttttgatgttttgaaacatcgtttttggcagggaaagtttcactctttccatcctgtggccaccatactcagctacctcaccaaggcaccacttgtaccgccgggaactccggtgattacgcactgtcgaagcagcgggctatgctggagaatattatga

SEQ ID NO: 49909 - DNA, 997 bp, Arabidopsis thaliana columbia
ctctctccatctctctagatcactatctctccttctggctcaatcaccacaaactcacaatcaaactaaaagtaaaataaaaccagaaaccctccatctgagtcagaagctctcattctctccctctctcttctgcaacacaaagatggacgagaagtggaggctgtcgaaaaaggatgcattagctgcgtcgtgttcatcttcttcaacttcatctaaatccaagttctctagaagcttctccacaagcgcttcctcctcaaaagctcctgcattcgtacggagctcatccaccaaatgctcagtgccttcatcttcgtcgtcttcaatctcaagaagttcatcgaaaaaagagaaagggtcaataacacaaaagtacagtagcttggccaaagaacagaagggaaggttttacatcatgagaaggtgtgtggctatgcttgtatgttggcataaacatgattcctaggtagatatagatctcatgcatttttattctctttttttgaatgattagatcagtttgattctctactctaagttgccacaagtttccatactagtacattgtaagaagagattcttttttgataatatattactattaattttgataagacagagtcatgtatacagaggtataaataatttaaagtgtgtcgtctgatgaagaaaaaaattgaaaacatcgaacgttttttaaaaaagtgaaattatatgccacaatctggagggtcgatgtgtcgagacgtacaattattttgttaggattaaatcgaatagtcactttcattgtctggcaaaaataatgaaaacaaattcaataataactaccaatgataaatttattttggtcaaagatctgaggtttcttttgtttccggtcaacagatctgagtgtttttcacatacttatttactaatttatttgtcgtcatatggcttttgcaatgtttatgctgtttttatagccgtgattagacttggaaacaatatc

SEQ ID NO: 49910 - DNA, 931 bp, Arabidopsis thaliana
acttgtactcgagaatcatgttgttctcaggagcaagtccaacacaagctctgagtacgttctcaagcattgcacgctgtttcgacaaagcattaacaactggcgtgccaggaggaacctgcattcattgaatgaaagtgatgttaaaggaagtcgctaggattgaaaaacggcacaatgttttgcttcggttttgcttaccagtggtgcctttgagaggtaacttaggagagtagccaccggatggaaagaatgaaactttccctgcaagaaaccaagaaaatcaagctcacaactaaatcaatttggataaacattgaactatctaacgattttgcaaataatagcaaacctcgttttcactcatgaactggatccgagtagtgagctcagcaagaagaacaaggtccaaaataattggagcagccaagagagagtcttcacaagtgttgtgcatcacaatcgtgttcttccctcccatgaatatctctgatgtgtattcatccattgctctcttgctgtctcctacacatggcacatactgcaacaccatccaatagtataatttatgttaatgtgatttgttagattggataattataattaatagtaaaattaatcaccttaatgaccacaacgtggtcagagctgttcaccaagctcgtacaaaattccgttgctaccaaccatatcgtccacgacattgctcttcgatatctcctttgaccggaatgtatgaggcgctgacaagttcatgccgtcgttgattcccaagatggttgtaactgacaatcgacgtcggcgatacatatagataaatgcaattaatttcgtattgtaacgctaccatatagaatcaatttaattaggatacttatttcggattgagtactttgattccggcgccaacaaggaaatcgacgaggacaga

SEQ ID NO: 49911 - DNA, 705 bp, Arabidopsis thaliana columbia
ggatatatagcaaattaacaacatagttccttttggatgagtcaatattcaacatgttgattttgccaactgtaaattttccttttcgttgatggttacagatgaatgtgcgaatttatctccattcaaaattactgaatttgtaataataacaaaatcagatattcaaaaatgcttcaagaaatataaaccacagacgagaatagtaaaaatgagatatgtccggtcagagatcaacaagcaagacaagtataaaaaccccttcaaggcttcttcatttcttccatttttaaaagtaaataagatagtaatattaacacttagtttttcttttccttttcattattttcttttattttgtaacagaaataaaagaaaataaaagaaaataaaaagatgggttacatttcaatgtccgtggttgcattccttgttgtttttgcttcgcaggtggttctagccaccgatacagatccgattccagaaaacagagcccaaatcccgcaatggtttaaaacaaacgttaaaccatattcccagagaaagggcacgctagaccccgccctcgaagctgctgaagcacggcgacaaattatcacagtaagtgactaaaatctgatttttggtttggtcggttcatatcgatttgcctgaattaagtaggcgttgttaaatttttgcttatatgaatagttacaaatgtat

SEQ ID NO: 49912 - DNA, 552 bp, Arabidopsis thaliana columbia
gaagaattcatcgcaaagtcatcgcaaattgcgagggatttgctgtacgataagtgtctcgcaaactgcggtaaacttgcggcgtacaaactttctgtagcaaattttgcgtcggagttgcaagtccttggcaggttaggtcagcacgttttaaataatcttcctgcttggttggtagttgaacttctctcgcaaattcgtagcaaaatagcgatgttcctcgcaagttcctcgcaaatccctcgcaatatgttttcgcacatctataaataaccaacgtaacatgtacaaaattttaatgttcaaaatacaacaggatacacctcgtcagaaccacctaagctaagagatacattccataccccaaaatctaacataaacatataaaaaaaaatcttacatgttttcagaaattgtagagagaagtaagaagcattgcaaaataattgagagagtggaagttagaaaacaaaatagttaagtaaaattcaagttaaatagatattcaaagaaaaaaaaaattacaacaacttaagcttttacgggatcctc

SEQ ID NO: 49913 - DNA, 555 bp, Arabidopsis thaliana columbia
tgctgcagctttggttcagattagaccaagcgcatataatgtatattcccctttacaaatgacttatggtcaagtaccaaatttatctcatctccacatttttgatgtgaggtatatgtgcctatagcaccaccacaaaaaacaaaaatgggacatgttgattctgtaaatcaaacaatgaatttatactaaggggttagataaattcacttctctcttagctctatagtaatcagaaaagaagaacaaagttgcttgaataagaagctagcgtttttgctatgacaaaagtagtgtttttttattaggttctagatccattgaatataggacaaacccctctatttatacaatgtttccttgatatcagaatctgataaacttctaattatctaaggtttaaatcttcatttcttctattcttcacaagatcctcttctttcaaaatgaaagtcttctctttccgaagttcaggaagtcggctgggcgatctctagccattgaattaggtcttctggcgacctcaccactttggcccattaacaggcaaaccgg

SEQ ID NO: 49914 - DNA, 532 bp, Arabidopsis thaliana
tcttggcgttgagccattttttcaaactgtcaagaatcgttttgtttgcagcctcggcttggccattcccctggggatatcgcggtgttgatttgcttaatcggattccccacttatcgcaaaagccttggaaacgtgtcgaaatgaactacgagccgttgtccgtgatgatttcgtaagggatcccgtggcgccatagaatgtgcttccaaacgaagttttcgacttgagcgtctttgatgctggcatacgctgaaacctctatccatttagagaagtaatcagtcaagacgaggaccagtttcttctatctcgaggcgtgcataggaccgatgatgtccatcgaccaacgcatgaacggatattgcgaggcgatcgaagaaagaagctcggctggttgatggatcatgggcgcgtgtctttggcatttttcgcattctttgattatcatcggccagaaaaatctgtggcgttttatctacggctcttcctcaggaatgatttccacatgagcttccgtggatttctttca

SEQ ID NO: 49915 - DNA, 562 bp, Arabidopsis thaliana
cgcatgtctacatacgaacagaaaaaaaaaaaaaaaaacgtacgcttaaaagtaataatgacgttctttaacctctgataaaacatctataatgaaaatttagttataaggaaaaaagtaacaaggattacctttgcaaatctgctcctaagttcagtggtccaatctcctaaggctctaatgtgaacacttaaatagtcatctcctggtgcagaagtgatggagaatggatgcctaaacaataataaagtaaaatcgatatcacttcacttaaagaatggatgatgtaccttaatcaagtatgaagtattatttagtttaccattcaaattttgagagatctggacacttgacaaacatgtacatgccacttttgtatttgaatccgggaggttttgtaacataaagtgcaagaacgttccccgaatatacaatagcctacatcgtaaaacgaacagaaaacatgaaagacaaaaaaaaacaaattaactaaaaattactatatataagcgaaaaaacactaattacagtatattagtttcgaaatgttatagtttactca

SEQ ID NO: 49916 - DNA, 621 bp, Arabidopsis thaliana
caactctttcattacattaactgaagataacaaaatagaaaatgtatgcacaacaattaaattaccaaaacccattttttcacttaacaacaaaagggaacaaagaggagtatgatacgatctaaaagggtcttggaaacaatttgacttgacgaagacgcaaagataatgatgcacaagtggaagatgagcgacattgaagaagaggaagtgatgtggatcgttgttagagatgttttgtttctgatttccacgccacgatccttatttggttcacttcttcttctctttgactttgacccttcctttatttcattttttaaaagaaaacctgtgaaagaagaaattccgattttatttagggcacaattattaaaacggattatgaggtaaaggtataagtataggacttacttgaataatggggaaattttgttgaatttgatgagcctagtaatgtgtgggaggtgggggagaagcgtagatgtagacaggaggtgggggagattttaccggtggtggtggagagctgtaaaggtatggtggtggtggggatttcaccggaggaggtggggagtggtaataatatggaggaggaggagatttcacaggaggaggagg

SEQ ID NO: 49917 - DNA, 729 bp, Arabidopsis thaliana columbia
cggtgttccttgtgtacgcgtttttgtttgaatttcatgctttttgtttgtttcggcaccaactaagtgttaactatcttttttttttatgtctcaactgttttattattgataaacttttacaagcccaacaagccagtccaattacaacaaaagcttacaaagaagcccaagcaaaaaaccatagaagaagatatgcttcaaaggacgtgtctaacgatacgtatgaggacacgtgttatcccaccaacctccatcgcacaaagagctcaactccggtcaattgatcatcgccggaaaacttatcctaacaatgaaattttgtttttgctcaccgggtaaaaaaggacaaacatcaattaaccaattttaactagttgctataaattccagcaaacttgggtaaagataaattgattaaattgaagagtccataactgatggtctaccatattgaaactctaaaaaccatagaaccagcgacgaaaaggcaattaacatcagcataggaaaagaagctataatcaccaaacaaaggcataatcgaaaccatgaaccgtcttgagtttaagacaaagatgaagcggcagatccaacagagcaaactataggagaaaccgcacaggaaacaaaaacagtaaacatgaagaagcaaacggcaaagaagccgatacgaagccggccatcgctgctttgaaagccatcaataccggacgagagctggccaac

SEQ ID NO: 49918 - DNA, 839 bp, Arabidopsis thaliana columbia
tcccgacgagctgacttgtgtcgatgagctggctcttctgggcgagttggctgatcttgacgagcagacttctcccgacgagctgacttgtgtcgatgagctggctcttctgggcgaactggctgatcttgacgagcagacttctcccgacgagctgacttgtgctatcctttctccaggtctcgaaaaagtcccctttcccgagactttctattccttatttatacccgtccgtatagtagggtacgcaaggtgaattctcgagagtgccccttttctacgcagccgaactcacatcctgaccaggccgggcttcggctggtgggccggctcgagttctaaagtgatggtcggggctgggtcgttattccttgaaatgggccggttgatcactgaggcccaattgatgtatcaacatgtggtttttataaaaagagtcgtgagaagagttttctctaaaaatcccttgtgtttggtaatcaaacttcattcaaccaacgaattccaaaaaaacaactaaattgttcgggtatataaaatgattggtaatgatatatcccatagaggccgtagacataggcccaaaaagtttccataactagcagaaattgaaacttgcaagttgcaaatattattacactggaaaggcaacaagtcttgaagtacaaactacaaagacttcttgtttggatggggacgactgacgagtttgaataacttaagagaaaagggtcgcaatcgaaattagacaagaaattagtcctcaaaaagtaaattctgaagttgaagcccaatgtctttgtcaaagactttatttagatgtaaagttatgtcttgta

SEQ ID NO: 49919 - DNA, 474 bp, Arabidopsis thaliana
cctactactcagccaaaataaggaatgaattaatggcattcacagcaacctggatggaactggagattattattctaggtgcagtaactcaggaatggaaaaccaaacgtcgtatgttctcactcacaagtgggagctaagctatgaggatgcaaaggcataagaatgatacaatggactctggggactcgggggaaagggtgggagggggtgagggataaaagactacaaattgggttcagtgtgtactgctcagataatggctgcaccaaaatctcacaaatcactattaaagaacttactcacataaccaaataccacctgttccccaaaaccctatggaaataaaaaattttaaaaataaaaaataaatttacatgatatacaacgaccttgactctaggcctgggtgactgattatatactggggtacaggttttagtcaaagagctggagactatatggcagaggggt

SEQ ID NO: 49920 - DNA, 556 bp, Arabidopsis thaliana columbia
tttttttagcccaaattttctaaagcttcatttaaaagtctttggcccaaaattattcagagtcgaccctgcacataaactagtttgttgttacgttaggatataggaatgtgtagtgtatgtgtgtaggcgtgcacatgggagcaaggattgttcctcgaattcaaagccgcatttgtatttatttgttagtttataaaaagattctaattcactatagttttagaagacagataagataactctattttagtaaatccttagggttttagtaagtcggagtatgttttcacgtgcaacaaacgaccaatgttttaaacgcgacaaaaggaattaccgtcactcaaacatatgatataaaaatagtttatgggattgtggtgataatgtatacgtgtaaagccggtcttcaaatcttaaaatatatatttttaatggttgaatccttttatcttcgatgaaaaaaacgttacttttttttcattatgtatacgtcttttcagtttaatattcaaatttgttgttgacctatttgggcacgacagaggaaaatatt

SEQ ID NO: 49921 - DNA, 615 bp, Arabidopsis thaliana
ttgttaccagtttcaaccatttttctctttggtagtgagtgattaaatttaaacctctgttgttactgagagtcatcatgttcttgacaagaatattaagtgttctatatatatatttaacattactgaggaagattagtataagatttattgcatttattttatttttaaaaaagccattacatgagaaagagtagcatttcataataatatatagaggtgacaatctctggttttatttatgaacaagatagagattgtgagtttgtagtttttaggatattattaatatataggtttgtacaataaccatgagatgacctcactctcaatccttttttcctttgcccttcttcttctcagaggaaccctttaccctggattcggaacctgtggcaccacctgcagaagcagcagcagctttgcgattcgctgcagcttaagaccctccctttgaggcagcttcattggtaatggcttctctaagatgtcaataaaatctggaggaaccacatgcagatctattttgatatataaaatttgaaatttatttttgatgtgaatagaagaaacagagataacgaaacattaccatttcatgacaactatattcag

SEQ ID NO: 49922 - DNA, 866 bp, Arabidopsis thaliana columbia
gcgagcgaggttttttgcttcgttctctctctctttttttttccttgtgaaggaaagagacgaataaaagtcttctctgaccggttttgtttaacgccgttagactcccattggcttgtaccggttaaagacccataaaccgttccgattggcgtgtggtttaggttgaggacccataaaccgtaccaaatgaaatgtcgagtgtcagcagaccggtttgattagtattcggtttaatagaaccaaacactgcattttaacttgttttggtctgttgtcgttagttttagcggaattaggctaacgatggcacgtcatgttaaaacgatcacaacgcggaaagatggaaagggaataaaaacgcgattcaaacacgcccaaatacatacaatattactattcactattattttttctttaccgaaagtaaattgtaaattttgttccttagatcatttcatcactagctctgaatgtataagaaatttgaataatgtgacgaaaagattttaatgagaatgcagtaatcaccaccttaaatgtaacatctacacgaaaaaaaagttaacatagaaagcaatctctacaaaactggggaaagtaaaaaacgaaggacaaatccaacttcaaccaataaaagaaacagcattttaagttccggagtttcaagacgtcgccattgaagaacctccggtgtccattttcacggtggtggcttcccgacgcaagcagcatcctctcgtgtacggcttcttagcacccttcaaagaaaaagaacagagaaattcactaacgttttgagttacatgttttcatcagaaagttattttgttggctcgcgacatcttaaatcgaaacacaatgag

SEQ ID NO: 49923 - DNA, 637 bp, Arabidopsis thaliana columbia
ttgcctgcatagttagatttcgttaatgggaattagtctgtgctagctttgcttgaggatttctatcacgggagtgaattaatcagttgttgaacatattgtctagggagagcttgattgtgcttgttaaccatccgaatagggtaggataccactccattcgattaccccatccttagcaatttctcgtctatatgatttctctatttcatcgttatcgcttaatcgttctcattgcttgtttcttagtttttgcatttactagactaacttactcgaccacacccagtgtctggcaacagactgtgcagtcgagtatagttgttttattttttgcctgttactcgaccacatcttgcttcttgcataagccagttgtggtcgagtgatttgtgtaattatgttttctgcatgttcacttacgactgttagaaactccaaaacctgttattcttggcttgacacccatttggattgacaccataagtactacaacgacatgatagtgctattggattaattgactaaaaacctattatgagcaagcagtcgtgagtggtttctcgaaggtctggttctgaattctactctttgactgaactacactaacatcctctttgttgatctgagcattcaa

SEQ ID NO: 49924 - DNA, 508 bp, Arabidopsis thaliana columbia
tgatagaataaataacattgtattcacgaaatttgtagaacaaagacaagtacaaatggacgtacatacatgaaaaaacattaattcaattgttcgacgaagcaattgccatgaataattatactctcaagaatcctactgctatcggtagagagtatatggttgaaaagttcaatatagcattcaacatgaatataacttatagttttttcaaaaacaagcttgataaattcaaaaaaagttacaagaggtggaaagctcttacgcacaaaaacaggcatcacggttgatcctgatacatctttcataaatgcatctgacgcatggtggactgaacaagagtttgtaagtacatcaaatatttgtattaatcaattataattcaaaattttggtatcacgtatctaaattattttaaaattacagggatgcaaattaacaaaaagcttgaaccgaaaaccgcctgtattttgggacgtgatgcaacgatgtctcgtagtacatgatg

SEQ ID NO: 49925 - DNA, 704 bp, Arabidopsis thaliana columbia
  unsure (1)..(704): unsure at all n locations
gtaacggccgccactgtgaatctagaaactaaaatctaaatccaaaaactgaatcgaaaatcagcatccattcaaggccttaattacaaaagtgtaataacaaaagtgatatgaaatgcaacaaaaaaacatgtgaaaaatgatacaacgaagagacaatatgagttaataacaaattcttacaaattgtgacacaactctctgtgttaattcttacaaactctcacaaggtcattgaagttaattgcaacagcttattaccttcggaaaaacctatgtgcaataaatattcttgtaacaattgttacaatgtatatacaaaaatgtaataacaaatctgtaacgtaattcttgtcacttataacttacaattaataacaactcgagtagcaattagcaacaactcgtgtagactattttggtgttcttagttacaattaactatactttctatatttgttgccaacttatcaaaatgactaattctgttttaatgcattctaattggtgtattaactcgttttgcattaaaaaaaattctaatgtataaacagaaattcagaaaggcataattaatatcatacatcaaaatagttgattatatcttacacaagtcttaataataagatgaaaagcataattanacaaagataattaacaaggataattaacaagataaatgcgttgtaccataattaataata

SEQ ID NO: 49926 - DNA, 478 bp, Arabidopsis thaliana columbia
cgactctcccagatcccctaacaaattcttcacacttctatctccccaagcattctcttttgtttcttttcgaacaagtctgtctcttgacttactcttctcactatgcaccttcgtgagtgtaaccccaagcattctcttctgtatcatttcgaacaagtctgtctcttgacgtactcttctctctatacagcaacgcgagtgacttatcacgcacaatcaatagcaactcgagtagcaattagcaacaactcgtgtagactattttggtgttcttagttacaattaactatactttctatatttgttgccaacttatcaaaatgactaattctgttttaatgcattctaattggtgtattaactcgttttgcattaaaaaaaattctaatgtatatacagagattcagaaaggcataattaatatcatacatcacaatagttgattatatcttacgcaagtcttaataataagatg

SEQ ID NO: 49927 - DNA, 876 bp, Arabidopsis thaliana
ctcgtcaagctgtctctgaatttcttcatcaaaggcctttgccttctcatccacatatgtgctatcaactttacgatgagtctccctaaggatgtggagcatcaaaaggctcaacaccttctttttgttgctgtagaaaacatgtacaacacattaaggacacgtttacttattaagaaaataacaaaaatgtaataaatttgaattcacttacaattatatttcagagttgttcataagatctagcacctgttgtgtgtcgatgtggcccaaacccgtcacggtcagagagtcgattggcagaggctgtctttctcttcttcttagcttcatcagtgctccaatactccaacatagactgccatgtgtcctcacttatccaatcaggtttattcctagaagatttagctttagagatcatgtctctaaggcgggcatcaactacatgataccagaggtgatacacatcattcaaatgagttggatttcaatagaaagattgatgcaaaaggagaacaaacaatttaggttacaaattaaaacgataaagtaagttatatgaagtatttggtaaaagatatcaaacttacaatgaagtctccccgccattggagtatagcatgatggggaacaaatgatatgttgaaccatggaccattaaagtgtcttcttattgcagctacaattgcacgcctgatgcgtgttttatttcaccttagacttttacctgaaagaccacgtacacaactactgcatgcacattatatcaaggtagtactttaggatcaaatccacaaggagagaagtagttcagagaaatcctttagaagagagtgaagctaggaccaaataataagagaatgggttgttgtatgc

SEQ ID NO: 49928 - DNA, 1410 bp, Arabidopsis thaliana
agtaacggatcccaataaaagaagatgattcaacttattaaatacttaaaaaaaaacagaaaaaacccctaagctaagatgtaaagaaaagaagaaaccatcacaacagctatgaatagtttggatactaataaaatcccgctactagatattgatggtgacggtgacggtgacggggaagctgccctaggtgatgaagcggtcgatgatgagacagcctttaccggtgatgaagcagccaccaccggtgatgagtggctaacagccggtgatgagcggctagttggtggtgatgagtgactaactggcggtgatgagtgactaaccggcggggatgagtgcctgacgggcggtggtgagtggctaaccgccggtgatgaaggggttatggccggtgactttgcggaagatggtgaagtcgtaggtgactctaccggtggagaaactgcatggacatggttaattaataaaatactaaaatatatggccttgaatgttttctatattttataagagtttttggtttttgtttttcaaaattttcgttcatgattttagttttctaattctcctaaaattttctcaatcaacattatttttctcaaaaatcaaaaaccaattttttgaattttttaaacaaaaatctaaaactaaaatctaaatcgaaaaactgaatcgaaaatcagcatccattcaggggctatattacatttcacgagaattaattttattaaaaacataaaaatatattataaattcataacattattattcatatgatagatttgaatcttacctggtgttgatgcagccggagtagatacatcttcaaattaaataacaaaacaatgaattaatattaatccacattaaataaacgaataaataataatgtgaccaaaagagaaaaatatataccacaattaggatcaatagggacgttgcaaattttaggcatggcaagagcttttgtatcatcaagtacgaatcccatttcacgactactctctaacgcagagcaaagacacttagggctatagttaagaacggttttgaccccaacacaacatgttttggtcgggcttggatccgttgatccgacggttaagaaggagagacaatcaaccatgctgtatatgacgctggaacagtcggtggagtttgatggttgcggtgttggagccatcgacggtggctgtgacggtgatccaaagtcggctgcatccgatagtgatgatgagagtaatagtacaatagatagaagaacaaaggatggcttcattttgtttttggtttggttagtggttccttgttttctattaggtttctttaggagcttgtacgtcgtgggaaggtttatatatgaaatgtgaagtgtgtctctcaagatgattttttttttttgagagt

SEQ ID NO: 49929 - DNA, 1954 bp, Arabidopsis thaliana
ttttacacttagttacaaaaatgtaataacaaaactgatttgaaatgcaacaaaaaaacatgtgataaaatattacaaggacgagacaatatatgttaataacaaacttgttacaaattgttacacgacaccctgtaagtaattcttacaaattctcacaagatcattgaagtaaattgcaacagcttattaccttcagactaactgtaattatgtgcaaatctgtaatgatattcttatcacttataacttacaaactgccacaagctctagtagcaattaacaaaaacttgtgtcgacttttttggtgttattagttacaattatctatactttctatatttgttgccactgacaaatgaccaattccgttttaattcattataattggtgtattaattcattttgcattaaaaaaaaaaatgtaaaaataggaattcagaaaggcataattaatatcataaataaaaatagttaattatatcttacacacaagtcatgattaataggatgaaaaacataattaaacaaggataattcagaaagcaaaaaaatcaaggctaatgtcttgtagccttaattaattggatgaaaagtataattaaacaataatcaaaccataaaaagagtagatcacttaaaaaacagcatcacctgcttcatcctcaccatcaagagcctcatcaacatcctcatccacatggatacgtgggtcaatgtcagctccatcttggtcccgattagcatcttcattcttcatgttgttgttagcacggtctggactggtcactgaagcgtcggttccttgtgttcgccgcgttgagccaaagtttggcgcactatttgttatgtattttcatgtactccacaacagatgtcagctactcttgcagggttatgacttggcgttcaagagtgactctaccgaaagcaccagctgctgagttttcacctcgctcgcgtgtactgattcctccaacaccaaaaatcctcccattttgaggtgctataacctatagagaaatcaaagaccaaataaacaacttcagtttctaaacaacttcagtttctacacaaattcagtttcttaaagtgctaaacaactttagaacatatggtttctaaacaactttagtttctaaacaacttacagtttctaaactttcttaaactgctaaacaactttagtttctattagtttggaccaaacaacttcaggttttaaacaacttcagtttcttacagtgctaaacaacttcagtttctaaagtttctaataagtttggaccaaacaacttcagtttctaaagtttcttaaagcgctaaacaactttagaccatattaacaacttcagtttctaaagtgctagcttgtaagaaggacaaattcagtttctaaactaaataagtttggaccatataaacaacttcaatttctaaagcacttagttgaaaccctctaaaatagcacgatgatagaagaactagaaactcgttaccttgtagtatatctcgaggcctgtggaattggtgctatcatcagtagcagaaggacctgatgagtttctagagagctcgatctcgtcaagctgtctctgaatttcttcatcaaaggcatttgccttttcatccacatatgtgccatcaactttaccatgagtctctctaaggatgcggagcatcgaaggctcaataccttccttttgccgctgtagaaaacatgtacaacacattaatgacacgtttacttattaagaagataacaaaatgtaataaatttgaattcacttacaattatgtttcggagttgttcataagatctagcacatgcggtgtgtcgatgttgcccaaacccgtcacggtcggagagtcgattgggagaggctgtcttgctcttcttcttagcttcatcagtgctccaatactccaacatatcctgccatgtgtctcacgg

SEQ ID NO: 49930 - DNA, 656 bp, Arabidopsis thaliana columbia
cacagccgtatcctcatcatctgtgtctcttagacctctcagggccatggaatctgaaaccgggaagtagacaagcaagcagatggataccacgcaaaagcagaagagggagaggaaggccaagaaagaaagggcttcgaatataatcttgtctgctgctgtgagaaccgacaaacagagcataacaatccttaatggaaggaaactcgagaccgagaatatcaaagtgtatactctcttctgtaaacgcttgttaatgacaagtttcagtatctgccttccaagccagaacaagtaagctgttaggacggctgcaaacacaccaagaaggatggtactcagtagaggatatgtgcataaggccacctcgtcgtgatcaataataactcgggaatacgttcttgtgaagtcgtgtggcagctttacataagagccactaccaccatttaggcgtgactcggacaacacaaccgcaagttgaagagcaagcatcgggagacaataaagaataatataacctgctgtgtccctgttccattttccgctcaaagcccctgattccatcttcaagggagcacgcagaagaaacatgagagtcagaaagagacaaggctccgcaaatcctagattggaaacgatgtaccacttgcaaacgt

SEQ ID NO: 49931 - DNA, 938 bp, Arabidopsis thaliana columbia
ttagacattagtcgctaataagtctttaatttgaaactgatgaaaatagtcgctgatacgtctctattctggctactatttaacaactcacatattctatttggacatttaattgggttttatcggctcaatccagttattgtagcccatcagtctaaagtatataaaaccagttttcggaaaccctaatcacctttctcctattctcgacgaaccctaaccctaatcccctttctctaatcctctcaattccatttcaattctctcatttctcagattcaatcctctcaatctctcatttctcagattcaatcctctcaatctctcatctcttagcttcaattgatggcttctcgtggtggaaaaggcaagagaggaagatgaaggggatcgaagatttccccaaatcgacccacttcttccgcggtgttgaatcgaagacccagtggtcttcccagctaatacgagttcatgtcagcgaactgtcaagccccacttcaagattatgatagaaattcgattgcacagcctccaacgggtcctagtctcaaagactatcctccttcgacgcatcttttccaatcgtgcgaaggatctcctcgtggatctgtatctcctcgagcctctggatctcctcgaggctctggatcgactcaacctcaatgtggaggatctgttcatcgtctagcatccacgtcgaaacaacctccatcagcggttcaacgggaagcgttcaatcagtctcctgcgacagttcaacgggaagtgtccaaccagtctccaatcttgaatcaacaatgggaagcgtcaaatcctccacctcgagcctctgtatcacatcacggctccaagctcaaaactcacgtgcagaggaagaagaagatgaggaagctgagtctaggaagatgttaaaaggtattcaactctcccataagatg

SEQ ID NO: 49932 - DNA, 490 bp, Arabidopsis thaliana
aagctgttctgccatggactagcgcgatcaaaactaaaagcaccaacacggcttccatttctgcccctcaactgctcagccaatccaagcctgtataaaacctgagcaacaacaacattatgcggggtttgccctagtctatgtgcaagcctcaaaaattttaccctgatcaactggagcttctcgcgggtctcatcatgctcatcagcctctgtagtggtagagtcttcagcttgctgaaactgattgtgagacccattcccattgacgcgagactgttgaggagcacgtgatgcaggttccaaaagaggagaagcacgaccaagacctgctgaacgagcaggtggtaatgccgcaggattacttctagactctgttggtgaacagaacttactacctcaggttctgtttcacatgtgaattttctgtaatctctggatctacatgtactctgctgctttgctgcttctcaagctccttatttggttga

SEQ ID NO: 49933 - DNA, 637 bp, Arabidopsis thaliana columbia
taattctaacattttaagaaaatctactagtaaaagctccttaaattttataacttgtgactcattgagaataagaatattaaattacatttgtaaatatgttttgagtaaagatttgggttttagtaccaacataaaagcaacgcaaaataaaaggcttctctctcttatctctctatatcttttagagagaagaagcgactacaacttcttccggcaacgatcagtttgtgttggccgttttttatctggcatcgtttggttttcttaactacgatgaccgactctcttctagcattggtggcttaatcagcatcattggctggctcttttctggcatctctcggctttttcagcgaggttggccagcttttgtctaacatcgatcggttctcgcgacgatggctagctctagtttctcttacggtgcttttggtgccgttgtttgtttttagttttcatctcgttggatctgtgttggtggtggtgtttgtggcgattttcgatcataagtgtctgtgttgtgattccactttcactcatgttttgtgaattaaaacaatttagaagttgagagagagatgcaaaactctgtttttcttagaattttccataattctttcttcacacacataca

SEQ ID NO: 49934 - DNA, 578 bp, Arabidopsis thaliana
tccacgatagtataacaccgaagcttgatccgccccctccacgaatagcccaaaagtaatcctcgcccattgcttgtcggtcaagaatcctcccactcgcgtcaaccacaagtgcatcgattatgttatccgcagctaaaccgtatttccttagcaatgtgccataaccaccaccgctaaattgtccgcctacaccaacggttgggtgaataccggccgggaaagcaagagatttggtggttttcccaatctcataatacaattccccagccgttgctccggtttggacccaacctgtccggttatcaacgtctaatgatatagaccgaagattccttaaatcgatgacagcgaatggtttgttgtacgcaatgtaagagagaccttcgtagcagtgaccggcgctccgagtccttacatgaattccatgcagctgtcgcatctgatcacagtttgaacgtcactggctttaacgggagtgatgattgagaccggtttaggtgtttcggaaaccgagaatcttggattttgtatcgaagaatcaatatggaaaaaaaggaagagctttggaagtgtgt

SEQ ID NO: 49935 - DNA, 1139 bp, Arabidopsis thaliana
atatcactgagaaactatatataagcttcccagcgtaagtttgagacaagattctcatgaggaacttttaaagagtttataatttcaaatatgattccatacttatatactaaggtttcgttctaggagtacttgctacattttacaaagatagacgggaccaatcactaatttgactaggatgggctatttggtttataagtagaccgacgataacagactaatgagaagaaaaaatattggaaacgtaccagtcccttttctaactcggatatcgctattggcagcctgagatgagtgacgactctcggtaaagctctggcaaggcacccagcaattgtctgcttgatctctgaggaaagcccatctaccatgataatcctccgggggtactccttcccgttaaccaataagaactcctcatgagcagattcttccttcccatatatgtatgccagagaggacgatgatacccagccaaacagtgaatcccacatcacagcgaaatttgataactgaggaaggaagaggaccagtgagtttatttcaacgcattcctaatgggtgagtatatttaaatgcataagagacttactgtgagattgaagccctctggaggtccatcaaaccacgattgatcacggtcaaacaaatcagaatctggaatcccgggcttatttggccacttgagaagagttggttcctcttcagtcatttcctcctcactatgttcctcagtaacctcttcgtcaagttgatgtgtgctgggcaacaaaatgattccagcttttgcagctatataaagcatgtcaaagggcaaaatttaggaatttatgcaagtccacaacatatggacatccaaagtatcatagctaaattaacacctcctatgcacttactggcatcacttgcatctgaatttcccgaagaaacagcttcggcagcctggctcaatgcagtagcaagggcttcggctaatgcaaggcgtgataaactattgacatcctctatatcattagaagacaggctaggacctgctgcgttatcattgtttctaacctcacaaagatcaccacggcaatcattctgatcggcccaagtaactgaacgactaagcttcttcgagccagaaattttaa

SEQ ID NO: 49936 - DNA, 917 bp, Arabidopsis thaliana
tcaaaaaatagagaaataaatagtattgttgctccaattttttttatttctaaagtattcctttaattgtaatatattattatgttcctaaatgaaattatataatttaattatagacttatataaatttattttaaaaatcatagttactagacatgtccaaacaagaattgacatctaagcccttaaaacagatgagctacaagatcaggcatatagcaaattaatcatctcaacaatcgtgttgtgtgacattctagtgggagtatgggacatgctaattatttccaattatttcactttataaccgttataatattggaccagatttagactagacatgtgtccaaacaagaattgtcatatctaatttgaatattcagaacaaaccggtgtacaaaacattccggtttgcttttggttcggttagttttattcgactctaaatttaccaacccaaggaaaaattcaaagagatgaaggcccgttacatgtgcaagggaaacaaatttgactatttcaaatatcattaacatatttcataattggtatactttgttcatcacagaagaaatccattggatcaacatttgttttaactctcaccaatctatcgaaattgttcttgaaatacttcactccccaaacctttgcttcctcgtactttgtcttcatattcaacccaagatacattcccaaatcaatgtctctaaaattaacataagctcttcgtggagattttgaaacataaggagtcataaattcgtatacactctcgacccatctcaaatacttttcagtattagtcttgttcttatcttcttcttcactccaataagctaaatattgaatctcataaagattaccttctcgtatgtgggaatggtatttcgttatccgcaatttcactcattttg

SEQ ID NO: 49937 - DNA, 968 bp, Arabidopsis thaliana
ggctcaccggtgtaacttggcaagacgccggcaaggtatcgcctcttctcttttcgtcacttttgcgtttgtgtttagcgtatcgacatctgtctgattgtcttatttgtaatttaccaggtagagctagtggatggatcatcttacttaggacagccattgccgttctctatctcgacattgatatggatcgaagtgttagtgatcggctacattgagttccaacgaaacgctgaactggactcggagaagcgtttgtatccaggaggcaagttctttgacccgttaggactagcgtctgacccggtgaagaaggctcagcttcagctagctgagatcaaacatgctcgtttagccatggttggattcttgggttttgcggttcaggcggctgcaaccggtaaaggaccgctcaacaactgggcgactcaccttagtgacccacttcacaccaccattatcgataccttctcttcctcctgatgtggtggcttttagcttctactggtgtcatgtaatgatgtggtggcttttagcttctactggtgtcatgtaatgatgtaacgtcgttattttaaagaaaatttggcaccttttgtataaacggaatttcttatacctcgcagtttgtgtttacgtagatcatcggagttatgatgagcctttacatcaaattaatcgtttgctaaattctgtcgaaattgttcacgttaagaaacatagaatcataaagttgactcaaaaagtgaccaccgataagtggataattccattcaccaaaaaaaaagaaaagattttgtttttcttctacagagtaaaaaataagacgcagcatcaaaacagagatagccccaaaacaatttcccaaaaccccccttaaccactatcccaacatcattagacagagcaaagaggaagacccgcaactattctttgaaacctttactcaaaacaatgacgacagagag

SEQ ID NO: 49938 - DNA, 437 bp, Arabidopsis thaliana columbia
tcaacgacaatccccaaatggttctaggggttttcgtcttcaagctccattggtaaagttcttacctttcttcgtttctcaattccattggtaggtttcgctacaaaaacccatcacgcgttttctgggaaatgtttagactttgacatgattctgcttttaatttcttcaatttgtttcctttttgagaaaccctagctaaattctccaaatttggcagtttttgactcttattccggaactgtttctgactatatatctgccctaaattgcaaaatgcatctttgttaaatcattatggaccttctctttttgatgttctgagattggaatcttgcaggtggattctgtatcttgttattgtagagtagattccggtcttaagactgttgtagaagcaaggaagtttgttcctggttcaaagctttgtattcaac

SEQ ID NO: 49939 - DNA, 1401 bp, Arabidopsis thaliana
tttcttaagtgtctttctcaccggattaacgacaacaccatcgtatccaaaatcatacacacttccaaagactcatcccttttttccatcttggattcttccatacaaaacccaagattctcggttcccgaaacacctaaaccggtctcaatcgtcactccggttagagccagtgacgttcaaaccgtgatcagatgcgcactgcttcacggaatccacgtaaggactcgcagcgccggtcacgcgtgggaaggtcaatcttacattgcgtacaacaaaccatacgtcgtcatcgatctgaggaatcttcggtctatatcattagacgtcgaaaaccggactggttgggttcggtctcttgctttcccagccagtatccacccaaccgttggcgtcggaggccagtttagcggcggaggttacggcacgttgcttagaaaatacggtttagcagcggataacataatcgatgcacttgtggttgacgcacgtgggaggattcttgaccgacaagcaatgggtgaggattacttttgggcgattcgtggaggcggtggatcgagctttggtgttgtactatcatggaagattaagttagtcgatgttccgtccacggtcaccgtgtttaaagtccagaaacatcggagaaagaggccgttaggatcatcaacaagtggcagtatgttgcggataaggtccctgaagatcttttcatcagcgcaacgttggagagatcaaacgaaaactctgtgcaggctttgtttactggactctatcttggtccggtgaataatctcttggccttgatggaagaaaagtttccagaattaggtcttgatatccaagactgcacagagatgagttgggttgaatctgcactctggtttgctgatttctctaaaggagagtctcttggtgttctcgcgaatcggaagcgtacatctctgtctttcaagggtaaagacgactttgtccaagaaccgatacccgaggctgcaattcaagcgctatggaggcgattagaggcgcctgaggctcggcttgcaaaggttatattaactccatatggtggaaaaatgagtgaaatcgcagagcacgaaacgtcattcccacatcgaaaagggaatctctatgagattcagtatctggctttttggagagaagaggaagacaagaacaagatggaaacagagaagtatctgaaatgggttgagagcgtttacaatcttatgactccttatgtttcgaaatctccaagaagagcttatgtcaacttcatggatcttgatttgggaatgtatcttggaaaggaagagacaaagtacgaggaagggaagagttggggagtgaagtatttcaagaacaatttcgagagattggtgagagtgaaaacaagcgttg

SEQ ID NO: 49940 - DNA, 726 bp, Arabidopsis thaliana columbia
ccccaacttccattctatcaatctcatttggtgtactgttcaaaggaagaggctgcataacttcaagctgctgcagactttcacctgtatcttggctgacaggagaagctagattagcttgaccttgagcgaaactttcagccattacatcaggtggattattaacattttcattgttatttagtagttcacgttcttcactttgttgaccaccttcgttaccatcacccaaaacagtttcacttccaacagatggaggaacatccgggtgcagctgctcttggatttctgtggtattagtctccctttcaacaacagtatttactggagcagaagcacgcaagttggaaataaaatgttcttctatcaactgggcaattgaagctgataggctacttggctgaggatgacctatatcagtccaccgactatcaccaacccctcttcttgatgaatccatacccacaacagaataatcagtcaaaggaggaggtgccccaccacctgctaaacgagcgctgaaaggatcaactggtacttgatcaaatggtagaaccggtgtatcaaacatgtaaaactgtgctacgtcgtagctgccagcttctgaatgcctggatatactgccagcacttgctgaaactgacgctgtattgccagtttgtgaaggcctggagaagagcgggtgctgaaaaccatgttttattgtttctgcttgatgtttgggga

SEQ ID NO: 49941 - DNA, 808 bp, Arabidopsis thaliana
cgaactaaatgcaaaaacgaaatagattaagagtatttaaggttttaagattcataaacacaaagaaaaactgaaagataaagcatagatcctttggacaaaccccaaagtgatctatttatagtaaaatgttgaacccctagattcactagaagacaagagacttgaggcggtttgggcgaatattcgatcttgggaatcgagtaaagagggtactgcaaagtctgtgcctttgtgtatatgctccgagtgatcaattggtcgagtagatgcttcatcctctcctatctgtatgctcagatgtctggttgagtggggaatgaggaggatccgaagacgctttgatagctcaacaagtcttgtagagatgcttcatcatttcgtctgcttgtttttgtggtataggtactaatctttgtgcatgcaaactcgatccaaaggtctacacacctactacttttcaaagacagaatagacagaatagctcatgaattacaagaaaccaaagcaaaggcaccctgtgatcagcaaaaaccagctcctatggatcaacagaaacagaccagttgatgttcaagacccacctaatgttgatcaaccaagaaacattggtgctggtcatgccccaaggaatcatcaccaaagacaagtgatactgcctccaccagttcaaaacaacaactttgagatcaagagtggtctcatctcaatgatccaaggaaacaagtttcatggtttacctatggaagaccccctggaccatcttgacagatttgatcggttctgtggccttaccaagatcaatggt

SEQ ID NO: 49942 - DNA, 574 bp, Arabidopsis thaliana
tttatcaccttttccaaatttcttaaatatacaagcgatgaattgaaaaaagtaaactcgtaatttttccaccaaaaaacataatcccgtgattttcccgccaaaaacgtaaatccgtgatttttccgcaaaaaacgtaaacccgtgatttttccgccaaaaacgaaaatccatgattttcccgccaaaaacgaaaacccgtgattttcccgtcaaaaacgaaaacccgtgattttcccgccaaaaacgaaaatccgtgatttttccgccaaaaacaaaaacctgtgattttcccgccaaaaacgaaaacacgtgattttcccgccaaaaacgtaaatccgtaaacggtgaaatctgtaaatattctaagtttgatgataatgaattaataattattaataatgataattatttattattgttttataataataattaattaaattattacttaaattattacttaacccatttaacaactcaacccatcaaattaaatgagttatgggttgactcaacccatcaaactaaatgagttatgggttgacccaacccatttaacaaaatgagttgg

SEQ ID NO: 49943 - DNA, 557 bp, Arabidopsis thaliana columbia
tgattaagctttagtagaatggtaaaggtaagtcccaagctatgcataaagagataagatcccatctacccagagtacatcaaatgaagctctaatggtaatcccatctccaatcccaatataagaacttaactctaccctttgcattcatgaatcttttaagcccctgtgtgtctaatcattcttttcttttctcttaactctaggagaagcgttctcaacactttgatacatctagcggatttggatttctttaacaactaaggttcctgtttttaacattttaaaacctgagggcttttgcccatcttcaatagctaacaagaactctttcttttctttacaaatctcaaaatctttactagactttttctgcttctttagcttacttcacctagagtcttctacctttcctcatcaatgaatcaaccctttttttttcctttaaacacatcccaacccaaagtataagcgcccacctagtcatatctagtccgaaaaatgcgaactagaactacatgagacactatctctgtcgttacgaacctaacactttc

SEQ ID NO: 49944 - DNA, 846 bp, Arabidopsis thaliana
tgagtcccaaagttgtggtgaaccatatgagttttagagtgattaagactttgagattgtttaggtttgagttatttcctaagctcaataagagagtaattcttatatatctttgagttcttaatcttctttgaaactagaaggatgaaattgggaatgcttgaaaaggattatggaaaaaataatccatcaacttctaagttgaaaaaagagagcttagagagatactggtaatgctctacacagattatcaagctaagtcgcgaacacgttctttaggtgtcacaacaactccaactccatatgacttagtttctgagtctccacttgatgatgatttcgataatgtaggtactactctctttactatactataattttataagcaatattttgttataactaacttgatgtgaatcttcaggatctctttgaacttgaaaaaagtatcggagttggtgtgagaagcacaaagacacatttgggtatttatttagatgagccaaaattagagatgaagtatttttcgatttggatattttgagctattggaaaaaaccatcatacacttggttatttagcatctatatggtacgagaagtgctggtatccccatcactaccgtagcttcggaatctgcgttcactctttgatctcgagtgttgactccatatagaaaccgactacttccaaggaatgtacaagctctagtttgcactcgtaattggttacgaggatctgaagatcataaagataatactctgttttaactaattatataattaagtgaatttttaactaataatgaaatctttaaattgtaggtaccatcgaagtcaacgatga

SEQ ID NO: 49945 - DNA, 470 bp, Arabidopsis thaliana
ctgctcagttatcccaaaggcaagagcttttcggaatcaacaagtttgcagagagcgaaatgaggggtttctgggtgtttgtatgggaagctcttcaggatatgactcttatgattcttggtgtttgtgctttcgtgtctttgattgttgggatagctactgaaggatggcctaaaggatcacatgatggtcttggcattgcggctagtattctcttggttgtgtttgttacagctactagcgattaccgccagtctttgcagttccgtgatttggataaagagaagaagaagatcactgttcaggtgacaaggaacgggtttagacagaaactgtcgatttacgacttgcttcctggtgacattgttcatctggcgattggagatcaggttcctgctgatggtcttttcctctcgggattctctgtggtgatagatgaatcgagtttgactggtgaaagtgaccctgtt

SEQ ID NO: 49946 - DNA, 706 bp, Arabidopsis thaliana
gtttggaagtctctatttagtgagaggtttggggagcaaccgaatccaacagttgctgaattggtgagctggttgaaggaggaggaaagcatggaagggtggaagcaacaagctctctctcttttaattatggtagatggtgtgatagcgtcccacaattaccccaacagaccgactttgaagactgtggagatgacgaagaacgtggaattcttctgcaaatacccatggggaagggtgtcttttacccgtactttggggaggatagcaaaatttcaaacaccttccgatgctgaactactgataaggggtttactggatgggtcttatgcactccatggctttccattagcactccagctgtttgatttcgaaacactcccatccattgcttagaatttcgaaacactcccatccattcattgccaacaataccctgtgaaaatttcttaatggcatcaaccaaaccgtacatcagttggtatcggtttagtttttgcggatcatttttgaaaaagacaaaaaaaaaaaactgaaacgaagaaactgaagaagacgaaaaagagaaagaaaaagagatggatagatttgagagagaattagaaagcagttcgaaattcagtatccactccttcatatttcgacatcacttcgaattgttgggtagttgaataagccactgaactcaaaatcggcaaagagaaag

SEQ ID NO: 49947 - DNA, 727 bp, Arabidopsis thaliana columbia
tttcctttttaaataaaataactgctcatatataaattttatttattatttcagaaaaaatacttttttacaaaaagacatcagtttattcatatttatcagcatatgaattatgtacaatttgtttaaccaaaactttgataaataatataaaaagaaagctgaaatcccaacatcagcactacttccaaactgggatttcagctttccataagcgttgctgaaggattttcctttcttcttaagaaataactcttcagccatatttgtacttatttttaaataagtagtgattgtatctataacatcactactctctaatccatatacatgtaccagttgagcatttaataaataacaaattgagcatttgataaataacaatcgggtaatgaagtaaagttataagcatgtctgtcgttgattgagagttctgtaatatacatgacatcttctaggccaaaatcaactttgaaattcttgaagcaaaaagcagacttcttagaatcataatactgcatcaaggcaaaaacaagcggcatattttgcggcttagcactagtttctttagtctccaagaaaaacttgaagcaagtaaagggtatagagatcaacacaacacagagaattgcttataactatatttttattgataacaagttgtttacaaatgttatcttggagattacttgatctattctacccaaaagatcaacccgactaagaa

SEQ ID NO: 49948 - DNA, 772 bp, Arabidopsis thaliana columbia
caattcaaacctgtcttgctatatatcatattaatccaaacccgtcccgctatatttttcgtctcatgatattttatttttttataagtttaaatattagttgtggaattagttgtgattgtgattttatgccgaaaaagtgatggacttttaattctatggcatattcaaaccaagataaggaatgtgtttaggtgcacatataattggggtttgcttattttatgggatcgtaaatatattttggtttgtttcacaatgtttgttttaattaattgtcgaaatttaatacaaataattcaaatagtttaaattttagttgttttaagatttagtgaatattgtaggtgagataaggagaacataatttattatgttttgcgtgacataagtgatttccatatatttcgaatctttttggtttgttacacaattaattgccgtaaaaaaatttaaaccatcaattaaaaaaaaaacaaagaattaaaatccagtggcagccattgtaaataagttccaacttcaggatttatttcacaaaataactgcaaaaatgtatctgtagattaaacttatattttacagttaaaatctttacagccgaagtttcaacagttaaagtctttacaacaaaaatctctataaccaaaaataacatttgttaccaattggttccgttgtcaaaaaaaaaaaccactaactatttttccgttttcgtcattacttatgagtctagatatcaactctttccccaaattagggttgaagttat

SEQ ID NO: 49949 - DNA, 722 bp, Arabidopsis thaliana
tcgtcctctaggagcaattcggtgatccacgtgtggctcttcatgcgttggctcagcctggggactgcttggagtcgctcttgcgtttatttttcccattcttgggatggtagaccgcctctacttctccagatttgtacttcccgaggaggatgttcaaaagatgtttacactcttttgtggaatgtcctccgaactggtgaaacgacagtacgagttcttcgagccattcggtttggccggctgcctgaggtcggtcttccgaatcgactgcggcaaagatcgttcctcgcttgttcgcctttggatcatagtgttgacgcggttcttgataatctccccgctctttttccttggcctttggcggttgagatttgcatgccaactttgcgtcttcctctttgaggaaagcatatcatgaagctctatgcagggcgtcgtcgagatatcgcggttctcttattgcgaggtcttttctcagcggggatccttggagtagtcccttcctaaaagcagccaccgcggcttcatctgtgatggtaactctagacagtatttctttgaaacgacctagatagtcgttcagtgtttcgccattttcttgagtcatgctccaaaggtcggaactagaggcacctggttgaataaatacccgatattgtttcaagaaggcagttgacaactgggtgaagttgtcaattgagtttgcctctaatctggaa

SEQ ID NO: 49950 - DNA, 550 bp, Arabidopsis thaliana columbia
gatgattaaggtaagttatggaaaatgtgatgataacagaaaaaaaaatgaaaaacgtgaacggcaggattcgaacctgcgcgggcaaagcacatgatttctagtcatgcccgataaccactccggcacgtccaccttttgctaagtgtattgctttatcaatacttaacatcaaaataaaaatcgacctgtggttaaacccccaataaactctcatctcaccgttaagttatagaacagcgaagaacacaacatgaaaagacaaatgcaagaaggttaatgtgacatagtttcaattacaatttcatttgccacatctctcaaactattacaacatattcaactatttcaataccccaaaaaaaaaaagcatttctctgcctatttcttcttatacatacgaattcaagtaccatgagaaaaaaaggaatgtacttataattagctatgcatcatcttcttaatcttcagtctttagtctttacttctcctccccaacccgcatttccattttttttctttattttttccccttctaacaatattgagt

SEQ ID NO: 49951 - DNA, 1382 bp, Arabidopsis thaliana columbia
tgagatgcagacattttcttgaaaacatcaggtggtatgtgtaaggtctttctatcgtaaaggggatcatcaggacgtcttctattggcatccctgattcgagaagactcaagccattcaaatttggttccttcgtttacttctttcttctctccacaaaccggatcctggagcattttcagccttttgttagagtccaatacaggaaccttatcctccttaaaagtcatttcatcctccagaactcgcttcaagcgagaagcacgtggacgcatccctggtgtttctggaccaggaacatcgccatctactcctatatcttctactgatctaagttcagctctcccactgaaactaaaagcatggtttctttcttgagttttaccattattggaacgaaattgaggaataacatcattagccttcatacatagagatgaatcattcagcggaacaacatcttctcggctcctgaaaatttgtaaacaacgatccaatgcagtaatcagaatctctccaacgaatacaacaaattacacgaatcttcttcttccagctaaagataacaaaattaagagaatcgaagattagtacctctctccagaacaatctcgatcatcgacttttacaaacttatgcataatattggagaacagggacgaagcatcaccggcggattcagccggcttaaatccagacggcaggacacgacgcggaaccttctccggtggagtatccgttcctctaacctcatcgacagatttcgaaacagcaaaacgtacagaagcgtcgcctttagcatcccttccttcacattaaatcgtggtcctcccgtgccgcccccgccgctagcagcatcgccggaaccaaacccttcgtagtcgccgccgtgggtttttggaagaaagacaaaatcgatctctggcgctgcattttttggaattgtgagagagagtgagagagaaacgatgttttgagctgagagaattcgaaaggggggaaagattggcgccaaaaattttcgccttgcgtcgtagaaatggcggaaacgatactcctcagggctcaactttttttgttgactgttcactctttgaggctttgatgaccgtccgatttatgttctattattgtataccgttggatctttctagccaacgagtcaatcaggcattggtattcggttcggctaaccccggtttcgaataattcggttctggaagtaagggatccgaattgaaaccgaaataaattttacgaaaatttttggttagcttaattttaatgataactcataaccgaaccgaaaaccaaatttatataaaaccattgagccaaatcggataatatggtgtaccacgaatccaacccaaaaagcattg

SEQ ID NO: 49952 - DNA, 1023 bp, Arabidopsis thaliana columbia
cccaaactttataaccaaaatcctactttagcttctggaagccggttgcggttctagttcttatgctcaacgatacacaaagcatctagtcatatttggcggttcagagcactactttgccgataatatacaaacaaaatcaaggtacgtaactaatagtaattaattaaacatctgcaccaagcaagttttctatgcgcaaaaataaccatgaattacctcttttggatcaggttaacaagattcaatgagggtgaagttcctgtatatcatgttcttggagtacctaatatatttagttctgttggtcgtccaagtggagaaatacatgaagtatggctatcagaggaagattatcaatgcgcacatggatatgttatacggaattgtgattattttcaggtaattgagaggtatataacaaaagtcatactcccattttaagttaattataaatgtttgtttactacccttatatgttgtttttgtctttataatatgttcgaagattttctttctattaaatatccaggattgaacaaaaaagaactcttcgtgaaaagaggtgaagaatatcatgtgtgggtgaaagattatgtatgtctaaataatttatctatatatatgatttgcatttatttattattcttcatatttataatgatgtttatttctaaatttgcatacaggttacatattggaacacgagtaatccatttccaacttgggttcaagagatagtagatggcctttgcacaaaggcaaaaccaggccaatgtattttataagaggctatttgtttcatacacagagtcatggagatggacgtaagacttgtaactatggtgtatgtgtgaaaggtgaaaattatgcggatgcatctgacgccgcaaatatttacggaaacttaactgatatcatagaacttgagtatgagggggtggccggtttgaaaacacactttttaaatgttcgtggtatgaccgaagctcggaaaagcactcgaaggagcaatagtggtgt

SEQ ID NO: 49953 - DNA, 805 bp, Arabidopsis thaliana
ccatagtactcgccctcccaacatgaagctcactcattagcaaacaccacattgcatcacctttactcaaattaggtttaacttgttgcaacaaataaaccatacccgcaagtgaatactcctccaactgtctcaaatccgtaaaaaccgtctctgattgatcctcattgttcacattactaccttcaccagtattactcttaagataagccaacgaattatgaagaatattagtcataacatccattccaccataacaatacccattactaagaacagctctcaacgccacatcctcatcataaccagaacccacaagcttcgaaatcgcttcattgtataaatactccaaatgtttcaacaaaatatcctctaattgctcctccgtacaataaccccaaccattattatcctcaaaactgccactagggtttgactctggacacgaatcgagaagacccggatgataaacaagatgcttaagactcgattcaacaatcgatttcgatagagccgtcctgtcgagcaaacaacacggatcgaattcgggtttcacggatctggtcttccggtttggtctaacatgcttctccctcacagtacaacccatcagagttaaagcacgtctatgtatatatgagaatctgaaggaaaagtcaaattccacagagattgtgagagtgaagagcattgaatccccacaaatgaaacacaaaaaccaaagcaggatcaggagaaatgggctttaactaatggctaaatgactaatcaatcttacagattataggtacgagtttcgaagtac

SEQ ID NO: 49954 - DNA, 406 bp, Arabidopsis thaliana columbia
tgattgtataaaatccgtaaactttaaaactttagcgaataagaagttttagttttatcattaaaagaaaattaaagagaagggatgaaattgaccttggttttatgggccgaaattgtttcttgtttgggctttgcacaaagatctctagttttgacaaccgtcaacggctaactaatcccgatctatccaccttctcaagcttgcttctctttgatcatctccgtcgacgatgtagcccccaccgcgtcagaattctccgtagaagagagatcgcacacacatacatatgatctcgcttctagttattgtaaacaaagggctcatcttccatcacgctctggtatcttgttggcgaaaagcaacggcaacaaatcaaaagatataaaatagaagaagtaaagga

SEQ ID NO: 49955 - DNA, 804 bp, Arabidopsis thaliana columbia
ggacagagacaacactagctatcaagtccgtcaacaaaaccgaccttctactgcaaccacacaaccttaaactactgtgagggcttatgacaaggtgttgtcaaagagtcctatggaaccctataaggatactaaccctacttcagggagtggtattacgaacattggagaggtaaggaactccaatccttgccgttattgtgaagacaaatggttccctagtcataggtgtaggcatctagactgaagagtctgaatgttattgaagaaaaggaagagagtcccctcattgaagagctagcagagcccttaacaccagaagaaggtgaagcagatgaagagttacatatactctctttgggttccttgtctgatctttccagaggtaaatcgatgaagatcagagactatatcggaagtaccagtgtagtggtgctcattgattctggtgctaccagctgctttgttaatgagagattggtcaggctgaagattggcgcattatagagactaggggatttggagtcaaagttggtgggggaaacgtgataagaagtagtggaaagatagccgatgcaccaatagagattcaaggaatagaattcattgaagatttcttgttgtttgatttaggtgatcttgacgtggtcctaggattctctaggttggcaaggctaggtgacaggagggctaactggggaaagctcagacttagttggcatattggtaatacttgggtgactatacatggcgaccctgaaatgtgtagagacaagtgtcattaggtcatggagagagcataag

SEQ ID NO: 49956 - DNA, 545 bp, Arabidopsis thaliana
tttcttgacttcatacaatgatgtatgaagcacattgtctgcgggcaacatctctggcaatgttccaaggagttcaacgaaactcttatcggaccaaccatttttggtcttgatcctaaaaagtcactatagcagacagcttgctgtggtttaaacagctaggatatagagctgtttcagcatctgctaactttgccagaaactcatcttctcttatgtcctcaacctctgcaatctcacctaagtcagcatcaaaaccctgagctgcttggtatagctccaaaatttcagcattccaacgactgaagttgctctcacagtcagccactgagtccacgtccccatgatgataccaatcagctctcgacttgtaagcctcatccatcccccttcttaagatgatccaccacatcgctgcctgactttcgttccacattacgacagtctttgcagggacatactatcatgtcaatgtctcctaatgcagcagccacatcggttacaaatttctgagcacctttctcatatccaggatcatctcttca

SEQ ID NO: 49957 - DNA, 1139 bp, Arabidopsis thaliana
tagtaacgttgtgactcctctcaagaaaatttaaaggacttgggggaggactatattattatttttagttccccttaaatatccacataataattactgtttgttgttttctttttaattcaaacatacaccattccaaagagacctttgatagttttctttactaaaatattattgaaaattacttataagatttattattaacatgttttagattgaaaattgctcatacaggcacataaacagattgagatgtacacacaacaaggcttctcgaatcttcccatatgcatgtcgaaaacgcagtactcattctcacatgatacatcaaagaaaagagcaccttcagggtttgtattgccaattcgggatgttagaggaagcattggagctggtttcatatacactacaaaaaaagtcctcattgatagcagtagaggatagctcattttcctcaactgctataaaagatgaataaaatttttggttactttttaatagcaccttataaacgctaagaccgtaaatcctctagcgggaatgtaaaatactttagtccgccaacacttaggtaaaattattcacttcagcgccaacacttaagcaaaactattcacttccctctacaacttcgtgaaaacctaacaaaatcgagaagaccaaaattattcacttttgcctaaaagctaagatctgtcgaatccacttccaattagcaacccaaaatcgattcaacattgtcgctggccagaaattcagattctccgccgccacattctccagctcagccactgttgagctcaaattcaaggttagtctttcttccttattaatccatttcagcttccatcttactcgcattttgacctaatctcatagaatcgacttccattttgcagccaccagtgagctctaaccttgtcgcagccaccaatgagctctaaccttgtagcagccaccagtgagctcaaaatcaaagcatgtcttactctcaattgacttagttctttgtgacgatttgattttggggtttatatgcatcgatttgttatttctagggcaatgtgatttgaatggaattaggaagtgaaacttttcttctttcttatactgattatcgttttggggtttatatactt

SEQ ID NO: 49958 - DNA, 819 bp, Arabidopsis thaliana
tgatcccctataatgccaccttaagtccttggccattttctctgatctgaacattctcttaaaccgtggaattatcggaaagtatcgtaataccttctgtgggactcctttcttagcttcaccagtttgcatgttactcttccaccgtgacgcattgcatttaggacaattttctagattcttgtacctctttctaaatagacagcagtcgtttacaaatgcatgaatcttttcatatcccatatcaaagctctttagaaattacttgacttcatacaatgatgtatgaagcacattgtctgcgggcaacatctctggcaatgttccaagaagttcattgaaactcttatgagaccaaccatttttggtcttgatcctaaaaagagtcactatagcagacagcttgctgtggtttaaacagctaggatatagaggtgtttcagcatctgcccactttgccaggaactcatcttctcttatgtcctcaccctctgcaatctcacctaagtcagcatcaaaatcctgagctgcttggtatagctccaaaatttcagcattccaacgactgaagttgctctcacagtcagccactgagtccacgtccccatgatgataccaatcaactctcaacttgtaagcctcatccatcccccatcttacaagatgatctaccacatcgctgcctgactgtcgttccacattacgacagtctttgcagggacatacgatcatgtcaatgtctcctaatgcagcagccacatcggttacaaatttctgagcacctttctcatatccaggatcagctcttcaagtaaacag

SEQ ID NO: 49959 - DNA, 531 bp, Arabidopsis thaliana
atgaatcatatttcataaatattttttgaatacgttgttatttgatactactatcaacaaaatgtaattaatccaccattatttggcttcaggtgacaactccacatgcatttaccataagctataaccgtaatacaccaagtgagagcagatttactaacgatcaaaaagatatttttacaaagatcttggaatttcatcgtcaggctaagtccccattcatgatcaacgcctacacttttttcacgatggacacgaacaatgtcaattacgcaatatttggtccatcaaatgcaataacggataccaatacacaacaaacctacaccaacatgtttgacgcagtcatggatgcaacatattctgctatgaaagctcttggctatggcgacgtagatatcgcggtaggggagaccggttggcccacggcttgtgacgcttcatggtgctcacctcaaaacgctgaaaactacaacctcaatatcatcaagcgtgcacaagttatagggacacctctaatgcccaaccgcc

SEQ ID NO: 49960 - DNA, 1058 bp, Arabidopsis thaliana columbia
taaacaggaaaaataaaaaacctcttaaagcaaccaaacctaaacagaaaactaacccatattaattatctgcttacctgcatagacgaacccatgccttgtccaacattatatgttctaagcttaattaaaacctttgtaagagcaattcaaaccataagcaacattaaactattgaagacagtaactcaaatagcatcacagacaagtgctcttggaccaatataccaacttatctcttatcaagttcatcaaattaagaaataaacaatggcaaacacaatcgacagtagctctatctcagattaaatcaaagacacatgttttaggaccaacaaattacactatctcagccaataaaaccaatcgacaacaatcacagcaacttaagtaaagaacagaacaaaagaatcacagcaacttaagttcatacaactcataagtaaagaacagaacaaaagaatcacatgcacaaaatttagttgaaagggactaacctgtcgtgtgaatagaagaagaaaagtttcagttcctcgacattgcaatcaccaacacttgataaaaaacgataatcagtataagttgaagcaaaaagtttaagaactctaaatcaatctaccctaatttcattcaaatcacaaagccctaaatattgaaaacaaatcgatgcatataaaccccaaaatcaaatcgtcacaaagaactaggtcaaattgagagtacaaaggaaattagagtaagacatgccttgaatttgagctcactggtggctgcgacaaggttagagctcactggtggctgcgacaaggttagagctcactggtggctgcaaaatagaagtggattcgatgagattaggtcaaattgcgagtaagatggaagctgaaatggattaataaggaagaaagacaaggttgaaagagagtaaccttgaatttgagctcaacggtggctgagctggagaatgtggcggcggagaatccgaatttctggccagcgacaaggttgaatcgactttgggttgcaaattggaagtggattcgactatcggtctctcg

SEQ ID NO: 49961 - DNA, 869 bp, Arabidopsis thaliana
cccctgtttgtagtgttgtctgtttgataattttatttgaaatttatcttactaccttatttttattgccataactattatgagagataaaccttatctattgatacacaggtggttcttgacaagttttctggtcgctcccgtggttttggattcatcactttcgatgagaaaaaagctatggatgaagctattgcagcaatgaatggaatggatttggatgggcgaactatcactgttgataaagctcagcctcatcagggtggtgcaggcagagataatgatggtgaccgtggtcgagaccgtggatatgatcgtgatcgcagtcgtccctctggtgggcgaggtggtggagattgctttaaatgtggcaagcctggacattttgcaagagagtgtccttctgaaagtagtagagatggtggtggaaggttcagctcaaaggatgataggtacagttcgaaggacgataggtatggtgcaaaagatgataggtatggtgcaaaggaggataggtatggtgcaaaggatgataggtacagctccaaggatgataggtacagctccaaggatgataggtatggtagtagggatggtggaggtagtcgctatggacctgatcgcagtggtgaacgcgctggaggacgcagccgggatggtggcagccgtggagctccaggaggtgagaggcacagtcgtgctccatatgaccgccccagagctggtggttccactagaattctactccaaagggtatgtatgcattctgttattttaactttttctattgtatccttcaaagttaagttctggtaagacttttgttgaagtcgctttatatcttcttttggagttaaagaagttgaagg

SEQ ID NO: 49962 - DNA, 1746 bp, Arabidopsis thaliana
tgttgaatggattaaatccatctgttgaaaggccaagccgcaggtttctttcttcagcagcaaattcaggatacttgtcattcatcttatcccatgtaacagaatctacagggtgacgaagttttccatcagtgcttttgttactataatgccaccttaagtccttggccatttcctctgatctgaacattctcttaaaccgtggaattatcggaaagtatcgtaataccttctgtgggactcctttcttagcttctccagtttgcatgttactcttccaccgtgacgcattgcatttaggacaattttctagattcttgtacctctttctaaatagacagcagtcgtttacacatgcatgaatcttttcatatcccatatcaaagctccttagaaatttcttgacttcatacaatgatgtatgaagcacattgtctgcgggcaacatctctggcaatgttccaaggagttcattgaaactcttatcagaccaaccatttttggtcttgatcctaaaaagagtcactatagcagatagcttgctgtggtttaaacagctaggatatagaggtgttttagcatctgctaactttgctagaaactcatcttctcttatgtcctaatcctctgcaatctcacctaagtcagcatcaaaaccttgagctgcttggtatagctccaaaatttcagcattccaacgactgaagttgctctcacagtcagccactgagtccacgtccccatgatgataccaatcagctctcaacttgtaagcctcatccatcccccttcttacaagatgatccaccacatcgctgcctgactttcgttccacattacgacagtctttgcagggacatactatcatgtcaatgtctcctaatgcagcagccacatcggttacgaatttctgagcacctttctcatatccaggatcagctcttcaagtaaacaggaaaaataaaaaacctcttaaagcaaccaaacctaatcagaaaactaacccatattaattatctgcttacctgcatagacgaacccatgccttgtccaacattatatgttctaagcttaattaaaacctttgtaaaagcaattcaaaccataagcaacattaaactatagaagacagtaactcaaatagcatcacagacaagtgcacttggaccaatatacaaacttatctcttatcaagttcatcaaattaagaaataaacaatggcaaacacaatcgacaatatactatctcagattaattcaaagacacatgttttaggaccaacaaattacactatcttagcaaataaaaccaatcgacaacaatcacaacaacttcaatgaagaacacaatcgacagtatactatctcagattaattcaaagacacatgtttaaagaccaacaaattacactatctcagccaataaaaccaatcgacaacaatcacatcaacttcagtaaagaacagaacaaaagaatcacaacaacttaagttcatacaactcataagtaaagaacagaacaaaagaatctgtcgtgtgactaacctgtagtcgtgtgaatagaagaagaaaagtttcacttcctcgacattgcaatcaccaacacttgataaaaaaaaaacgattataagtataagttgaagcaaaacgtttaagaactctaaatcaaatcacaaatcgatgcatataaaccccaaaacgataatcagtataagaaaaaagaaaagtttcacttcctaattcca

SEQ ID NO: 49963 - DNA, 822 bp, Arabidopsis thaliana columbia
tcttcaatttcaaaaaggtgttgaagaataacttgatcaggctctttcacgagagaaaattcatttgccaaagcaaccaagttcagtatctccgattccacatagccaagaaggtttattatcccagaaacagcaccagagtttgcaattgtcagatttattcctctgttcctagtacaaacaagactagccattgcgtgggcagcgaaataccgatctatcagttcatcagatcctagcaaaactgcaagtgttggaatgatccgcattgtcgttgaagaaaaggacacattgtcatcctggaacatgatagccaggaggagagcactaatccaaatgccttctgtatcctcaaattcagcctggtaaaatagtttagctcaagattactttcaagggggaaaattcatcatacaaggcatctctgccacaaaaaaagttagaatcaagtcaagcctaagagaaactgagagagcagtgtgattcaaaaccgaaatgcacaattcatgcttgacaagtctgtaacgatataaagaagtgagatttactgtaacagaacctcttatctaacagaaggacctaaagaccaaaccccgccccgcaaagttgtataactcataacagaagttcgctaatttatttcattcccaacgaaaggtgccctgtaggatacccataaccaataaacatgaagaagcatataatttttttatacccgagaaaggaacatttacctgagcactggaagtatacctagcaagcttccccacgagcacctcaagtccgccagcttccataacaatgacctttgacttagcatca

SEQ ID NO: 49964 - DNA, 1372 bp, Arabidopsis thaliana
acaacgtgaacttagaacctgaaacagagattaaaaataaatccattcgctacgagctagaagattctgcttcattgctccaccagaagctaaccgagagactcattgttaaggacctgacatagtgccaccatttgggagggatgtacaacatttcaccttcttctagaatacaatccataaactccaactccatggcctttgggaactcggtttcgtcgatattgtctagatcaaccttcaaccatagtttgaaaccacccagttttggaacagaagaatcgagtcagctttcggttgtatgtttaatccaaaaaatgagatttgacttcggaatgaaaaagcttacctgactagagttgcagagcattgtctcagagtaagggtaaagttcgtcttgcaggaaggatgggtaaagccttatatacttcttgccaacaacctgaagaacagatgatatcaaaacttcagtagaaggagaaagcatctaagtaaagaagtttccgtaaactagaaacatatgaattgcaggccaaacgatttctttggttagtcaaagagtcatcaaacttcaatccagcgagaagatcaggctttattatgcaagaacatcaaagaagaaaaaggttgttaaacacttacagaacatacatatatatatattggatagcattaaagacagcgagcacagacaagagccatgctcagctcacgtaaggaaaagatctttcaccgtagttacctgagcaagtatattatgatgtggatcatggtgtaacggagtaactgtcccagccgggccaaaccatgcattaagtgattggagttccccaccaccgacaaaacagtaatcaggaatacatatatcatctctcagttcatttatctgcccattcgtgttaaaccaatagccataggtttagtatgacacacaccgagtacagacaaacatatacatcaaacatctcggtacttatatacctgatcaaacaaaggatgctgggcaagataagtaggctccattggagacgatttattggtccgcatccgttcaaggaacttagaaaatgtcacaagctcttgcttccaatcagaacacaaatagtttttccccacctgaatagcattttaaacttcaccagctttcagctacggaaaaaattattctgatccaacccatcttcttattagctcagactaaatagtggtaataagactcatatctctatgaagcaaaaatgagaaatcttacgctcgtgaaattgtcatgttcttattctgattttatgtgataatctaacctagatacaaatcttatttcaaacctagaccctaaaccctgtttatcatacagttgacacgactctatgag

SEQ ID NO: 49965 - DNA, 947 bp, Arabidopsis thaliana columbia
tattacttttatagtagtaatataaatccctcagttttttcggccacaaaataattatccataaatgtaattgcttaaaaagttttatatattctgctattatatatgagtgtatgtactttttttttgccgtctaaatttattatttattacaaattatgaaaactgttacatagacgattctactacacacaattccttccgacctttattagatccacgacagacgacacattcttctcattctccatgcgtttgatggatatcttcaacattttctctgcgtaaaatcttggcgaacggctataattgtacttcgttgtagacctcatgtacacttgcctccattaatctgcaaatttgctaataaactgtagtagctagaactcgaaccccagacctcttggtgtagaaacattaatgaacatttggtcaactattgggccaagggggcttccacagtgtatgtgtatgtacttcttaataatattttctttattaatgtagatgccaatatgacttgaatcaaaaccctattattatgtctaattggttcacataatcttgctcaatatggaagtctagtttttattctgataatattaagcctccttcttgggttgtaaacagtttctacactaaaaaaaaaaagtggttcacataaaagtcaacgcttttataccataaacataaaagttcaaagatacgtttactacgttagttgttaatttgacttttcatagacttcaataacaggaaaatttgaaatttattagaggagagaacaaatttaatcatttaaaaatacaaaagcaaaaagataacaaatttaatcattaaaatgtaaactaaatagaatttacccgcggtataccgcgtgctatattgtttcaaaagtataatgttatttttttaagattactgaaaatatacatattaatttgtat

SEQ ID NO: 49966 - DNA, 537 bp, Arabidopsis thaliana
aaagcaattgttttgacgagagagcacaaagcaatttatccacaggagcgctctcgcattcaaaaggttagtttttgatgagccagacagagacttccaagtaaatgtgagcacaccatgctctgttgataacttgctatgagtttcacagtcaggtggtgttataagctcaaatggacggttacaagggcgtcttgaggtttctagggcttttggtgatcgtcattttaagaaggtaatgatccggtggcttcccactttatattgagcccattatctgtgacattttagctctcgcgtgcaatattctatcgacatgttcttgaaccttgctccatatcattttgcaacttcaaatgcctagaatctgtaacttatcctaaaatcttatggtttattcgcatctaacgcaagttattgaatctagtttggtgtcagtgcaactccagacattcatgcttttgaattaactgagagagaaaacttcatgattcttggttgcgatggattgtgggaagtaagtaagctcttcgtttg

SEQ ID NO: 49967 - DNA, 841 bp, Arabidopsis thaliana
ttgcatttggtgccagtatcgttgggtttcattacatgcgcagagttgttgttgtcgacggtaccgctggtaatatgggagaagccgtttttataggcgtattataccgctggtaattgggctggatataaccgtaactcggttagtcagtaaatcgaattgaacttcatgtttttatggacaactcagccgtaatatgttttaaatcagccataacaaggacgatttgtcgccaaactcagctgtaacatgcaacctttcgtattccttgccttgtctttattaataattcctgacaactcagccgtaacattgttacatgtcttgagtgtaactcagccgtaacgaatatattttgccgccaaacacagtcgtagcacggaatattttcccgccaaacacggaacctttcgcattcctttacttgtcctttttaataattcttgacaacttagccgtataatagttacatgtcttgagtgtaactcagccgtaacgaatatattttgctgccaaacacagccgtagcacggaatattttcccgccaaacacggaacctttcgcattcctttacctgtcctttttaataattcttgacaactcagccgtataatagttacatgtcttgggtataactcaaccgtaacaatatattttgccgccaaactcagccgtagtacggaaatttttccgccaaacgaacagacacggaacttttcgcattcctctacctgtcttttcttttctatatatcagttacttgaactcatcatttagacgtctcatcctcacatcttaacgacatggtgcctcacatcgacggacagtttctaagagatg

SEQ ID NO: 49968 - DNA, 577 bp, Arabidopsis thaliana
taaaagtagttttcagatgtgtgtgaattgtgagaatgttttgaccggtgtgtgtgaatgcgttgccaaggactgtaagtgttggtggtgtacccacgtatgtgttatttgactcgggagccaccaatagcttcattacgcctgaggtggtcgcaaagttcaccacaattttttgaggaaaaggaagttaatatccttatccataccgcgagtgaccaaccaccccttcaaacccgtagaatcctattagaagtacccgtagtaatccttcggacaaccttacccgcaaaccttttgattatgcccatgaggaagtttgaggtgattttgggaatggattggttatctggataccatgcccggatagagggtgctaagagtagagtggtgttcgagttaggaggccaaaccaagttagtttatatcggagtgagtccgagtgccggagcagtttttgaatcagcccttcgtgttgagagtatgctagtccaaggacgaagcatatctagtaacctgtaccacggttggtggagataatgaggaggacacaaaagtggaagacattcaactgtaggag

SEQ ID NO: 49969 - DNA, 512 bp, Arabidopsis thaliana columbia
catcatattcttcaatagatttataagttttaggagaatgtcgacattatcctagttcgaaaattggttgtggagaatagtctaattggtctttggtccgaatacgatacgtggtgtcaaaacatattccctctcataatataacaaaagaaaagaagcaatctcattattctgccagtgattaataaatgaagtgatatgttatcaactagacaccttttgttataaatttgaccaaaacaaaaaaaatgaaagaaaaatatatgaagacattagaaagtaaaactaactaataaaataattagaatgcgaagggaggcacagaccaaaacaaacatgaacgcacgtccattacttacttgttcatactcttctttcatagtgtttctcacgttgaaaccaattttttcgcctttcatttcagggaaatttttttaagccattgtattcattatatatatgagatcttatgcattagtaagacttggctttacagagagataataagagta

SEQ ID NO: 49970 - DNA, 592 bp, Arabidopsis thaliana columbia
tgtttctttctactatctcatcctaaacaaaaaaaactaaaagaaaaagccacgacctaagcacatgtcacgaaggcgacagagagatggtaagggaaagtgttggcgtagtgaaaagagagagtggagccaaaaggcaaaggcttgccgttgttgacgagacagtcgtcgtagtgaatacgcttgaagactcttgggtttatcaacttagctgagctgaaccaaccgcagttgatgtggatcctcgaaattatgcatccagacatacactggttcgttatctctaccatgtagcctggtattccgttaggcattggttccgttactgcttggttcaccactatgtccgtactcttgcacttttctccaattctctccggctctacactcctttctgtttttcctttatataaacaatcacacacacaatcaaaacagaggaatttcagtatattagtagctacattgctaagaggatatgctaaagactcgttctctctaactacattttctagtaaaaatttaatggaataccaaaaaaatattggagtataaatgaaaaaagagaatctagtataatttgacagctgga

SEQ ID NO: 49971 - DNA, 668 bp, Arabidopsis thaliana
aaggttgctggagctgaggaagaaaaacaatgacagagtcataagagctgatcatcaaggagttttgagggatgaagattagcaagcctacaatgtcgctagatagagattgaatgatcatggactcatccaccgtgaagacatcaatgaggaccaagtgcgcgcagttggctgctagaaacgcagcagggctcggtgtcgagcgacacccgcgggtcagaacgagtaagagccagatgtcgagcgacatcacctgggtgttgatcgacaccaaccaaagaatcctgccgcaactaatctaccagctactgaacaacgtcgtactcttgcggatttcaacaggcccaacatgttctatgctaaccggcaagcgatcgtacccccaccttttcagagaaatgactatgagctcaagcatggctactttgcactaataggccaacaccctttccattgcttatgtcacgaaccgccaaatgaccatatcgagcgttttgaggacctcgtactaagcattaaggctaatggagtctctgaagactacttactatgcaagctattcccttactcacttgctgggaagcgggttcttggttgaagcaattgaaggctaggtcacttactacttggagaacatcaagataacgtcctgaacaattctatgatga

SEQ ID NO: 49972 - DNA, 546 bp, Arabidopsis thaliana
gattttctgttgacactgtcgttagattaacaagtctggtacccgctattcttcacaatcgtctagcatccttctcttcgattattgatgatgaaatcgataaatctgttttagtcggtgagatttttatgaatttgttgtggtcattattttatatcatgcatcttagtgttcattagttttgtcattttcaatatcaactgtatatatttgactctgatttattttaattaatttatgtaatttgttggagacttggtgggagcgatctatgatgttggagaattgattaacacaagacctaagcaaaacaacgtcgatgatttgacgctaacattcaaaataagtgacaatgagtaagtttccttctttgatagtttaattcgaattacctaaattatactattctaatactatttttgattttatgtttagaaaccgtgtttttgaatgtctagctactaagaaggaagctcttgactttgatcataattatcatcgatatggtggtggagttattgtcgctgttcttgggtgggtggaaga

SEQ ID NO: 49973 - DNA, 803 bp, Arabidopsis thaliana columbia
atagttaaaaccttaaaaatatagttgtaattgtgtataattctaaatataattatttcactaaaatagtatttaaaatcgtttaatgtgcccactagtacgatctaagccactccactgctcaatatccataaatcaaatcataagtagttcatataattattattgatactcttaaaattgtttcttaatgctcacaagtcacaatatcttctctttggtattgttttcgtttggaagttgtaatacatattgttattaattcaatcattataattatgactactaatttatttattcgttggtttatttaagaaaaatagtaaactgatttaatatagatatttgaagcacataatcatgtcaaataaatattatttgatatataactatgtatttattttattttattatgaaggttaaaaaatataatattttgcctcatatattaactatatcataattatcgaataaccgtatccatatttaactataatcatatttaaccgtaactgtatttaaccgtaaccgtatttaaccgtatccgttttaaccgtatatataatagttaaagttaagattaaagaaaatctataaccataactggtggttaaaaaaccgtaaccgtaataaccgcacccgtggtcatacctactaacaacaaacaaattaaaacaaaagtttatcccgtgaagagagaaacgggcggaaaaagataaatgcccacaaagaaaataagtagcagaattttaacttttaccaaaagaaaaaaatcgcctcggaaatggtgagaagtatagtag

SEQ ID NO: 49974 - DNA, 847 bp, Arabidopsis thaliana
atccatgtttagcactacgaagtctgtacgcacctccacatttccaatcttgttaggcaaatcttctaataacacatgaggtagtctaacagacctatcagccaagatcaaggagatattgcagtatttatacttgttgaaaaccaacctcttagctactgcgagtggcatgagatttactgatgctcctaggtcacaaaggcatgtattgaaagtcaatgaacctagggagcatggtagagtgaatgaaccagggtctcctggcttttctgggacatcgttctcctgtatgatggcattgcactcatggcttagaactgttgttttttgaacctcttgaattctctccatgatcaagtctttgaggaacttttgggaatccgggatacgcgttagagcatcagcaacaggtatccttaattcgacttccttgatgttctcggcaaacatagctctgtacttttcttctaactctttcttatgtcgactaggaaatgaaagtgggggcttgtaaggatgaggaatgaagactttttctttgtttttgacagcaacatgtttcggagcagttggtgatattgctgggaaggtcggtcgagtgaagtggtcgagtggcagctcgagtgacaggtcgagtggctgctcgagtgactagtcgagtggctgctcgagtaactggtcaagtggctgctcgagtgactggtcgagtggctgctcgagtgactggtcgagtggctgctcgagtgactggtcgagtggctgctcgagtaactggtcgagtggctgctcgagtgactggtcgagtggctgctcgagttgtttgtcacttgatctttattgagactga

SEQ ID NO: 49975 - DNA, 1140 bp, Arabidopsis thaliana
catcttctggctctcgagttgaaagaaagagaataaaggtgaaacatttacctttgatgaggagattgtagagttaacaacaaccgaagaggccaaaacattgtcagagaagactacgtaatggtagagatcaggatcattataactttgttgcaaaagctgccttttttcgtgatccagggtaaaatattctgttgtcaaccgcattgagagacaatgaagcccttttggggtagtccttgctgcaagctgcattaaatatgctgcttgtttcttctgcgcccgagcttgttcttcggttttataagtcatggcttggagtttggtagcaatggcagggcagttgtgaaaggcacggctgaccttgtataacgcaacttccatggccttcaatctgttaggagagctgaaaagaaacaaaacatttatgtatgactcttctaaattaacacaatattcattaagatttagcttcataagtaaaggccaaaactttttacaggatggaacaggactccctttgaatcaatcagctgtgctcacctctttggcaaatatttatccttggtagtatcaccagtagcccgttccagctctttcgttcgaactctcaactcctttacgatttgggagttattcccaggtagggcaaattcagatagcgtttcgcttggataattttgtctctgatctcctttaccctctcatctgttgctctttcaagttgaacccttgtattcttttcactcttacttgaagggggtcggaattccgttttatgattaagttgaatatctcttgctgaaattttcacctgagacaggaaatggaacatacattacaaaattaaagcatatgctatgactatctggatgcaaattctaaattcgattttctattaacaagtgttagcaaatcccattgaagaaagtgtcctgtgatttgacaaaaagatactagaattctcatagtcaattgcttctaactaatccataatcaagttccttttatcttcaaatcaactggattaaactacgtacctccgcattcgagcttactgtggttttctgtgaaactgcttgttcctcctttggtttgtgattatttcctgaaatacatggtatctaaagataagaaagc

SEQ ID NO: 49976 - DNA, 578 bp, Arabidopsis thaliana columbia
tattgcataattagaaaattgtgttttcaacctgattatttggaaaatgaattttgcgaaaccgaatttcgtgttgtcaatagacacacatgtgacaatctactagatacgtcaatcattaccataaaataacgaaatgacccacacgaagggtgaataagtcaacatatgtcaccatgtattctctctaagaataatggtgattcattcccaatttttgctggcgatggccgaattatgagttttccttggcattataaaattggcttcgatgaaatcaacaatattatttgcatggccagataatgcatcacacttccagcagagtcttttattttgagagaggagaaatatttttgatctataagtattgtgtgggtcgtagcacttcctgccagacatatctccatcctcaatctcaaaatttgacattttctgagacaaaacatttagaaatatgcattaataaaataacacaatactgaaaaaatgttattatatattacaatgacaccgttagtccaaaaacttttaaaaccaggaaatacatttaaatcaaaaagtacatatagtactac

SEQ ID NO: 49977 - DNA, 596 bp, Arabidopsis thaliana columbia
attttaaaagtaatagaaacgttttctacttgtcaaagtttgagtctttgtcatttattctgtagttctttgggagtgagtcactaagtacttcaggatctgcggattaagtttgttgagtgattcaacatccttcattcgttcattgatcgagtgagtcgattaccccactgattgagcgagtcaatcaccctttctatccatcatttccccttgaaatgatcccacacgagagaagcgatcgccagcgtgttagatcaccaccttcatcatcccaccttccgcgtggcaagtttggaactcttgatcatcaagtgatcaaaggatggattagctccaattctagcatcaccttggtatcagagcttcaaaagctcctatccccaaggttgtatctcttcaacctatatctttttcgatttttctattttattatttaacttttataatttgaaatccaaataaaaaaatttgtttcttgctttgttattatttgtttgcttctgcatctttattaaaaaaacaataacaaattcatttatttatttattttggatctattaaaaaaaagatcatattttgttgctttaattgaa

SEQ ID NO: 49978 - DNA, 550 bp, Arabidopsis thaliana
taatcataaaatgaataaagtttttttcttcttctttataggtggtagaattgtaattaaaaggaaaggtagatttctcagacgatgaccttaatcataagttcctaacacattttgctcctcgaaatgcgaatctcattcaacattaggccttaatcatagttatccacatgaatgaaacacatacaatctcttctctctccctgtatatatagtatccataaaaataaaagtgactttaacaaaataaaacataaaataattgggactctacatcaatcatactagagttgtggttgttgtggaagtcgggtgtgggggaagtggatattgtggtggcaaccaatcagtttattcatgcgaaggtggtgagtaatggggatcatatgcatctgattgtggtgtatgcggcgccgtcagtgagtcgtagaagtggtctttggggagagttaaaagatgtcgtgaatgggttggaaggaccactacttattggaggggatttcaacacgcattttgtgggtggatgagagaatgggtggaaacgggaggt

SEQ ID NO: 49979 - DNA, 448 bp, Arabidopsis thaliana
tcgctaacccagccgttgttaaacataaaaacgggaagtggagagtatgcattgactttacggacctgaataaagtatgtcctaaagacagtttcccactcccgcatatcgaccgacttgtcgaagccaccgcaggacacggactactgtcctccatggccgcattctcacgggtacaaccaaatagttatgcgcccaaacgaccaagaaaaaaccgctttcattaccgaccgaggcaattattgttataaagtaatgccctttgttttgaaaaatgccagagctacctaccaatgaccacgtcccacaattaagggcatctccataccatccctatttttgtccctaaactctatttttgtctttatttcactccaaccctatctctattctcaactctgttatagagctctctattttttctccatatatagagacaacacatagg

SEQ ID NO: 49980 - DNA, 496 bp, Arabidopsis thaliana
ggtagttcaatagatcaacagtacagtatgtatagagaaaccgttgaccacagtagtaataggttaaaattttcgggaaaacacaaaatcagaggacagaacacttgtcaaatacaatggtagattccagaccacataaaataaattggcatcttatgtagcaacaaaacaaaagaattttacatttataagcagaaagtctcacaaactaaccatgtattcttttgtagcaacaaactcaacggttcccctacacagctcaggtctttcatcaacatccctacgtctaccatctggacccagattacagtgatagtcacggggagtctcatcagtgtatcctgtgcaaaagaaagttgatgaggaaatggatcacaaagcttcccacatcaacgaactcccaagagaatacaacaataacaatatataagcatctctcttaaacaaaatcatatcaccgacttccacaattaggtgaaatcagattgacagaaga

SEQ ID NO: 49981 - DNA, 1205 bp, Arabidopsis thaliana
cctgcaaaatgtatacaagactttgttaaaataatgttgaagcaaaacatgtctatttagaatcattactctagtgaccatatcctagcctcatttcccaactcaactgtttataagaaataaaaaataaaaaatacatgtctatcactggaaagagcgagaagatttacaggaaggtctgagaggacttgctggattgcactgcaagcagctgcagttgcacctgtttgaatcgcgttcattgagacatcaatgaggaagaaatatactgctggcattgggtctcgtacctgtaaaaaagatactgatatttatcttcacctggttgcaatggataaagtagcttgcttcgcattaccaagcaaatataatcatcatacattccttcatagaaactcaatctcttagctcaaaaccaaatcttaatttataagggttgtttttaatttgtggatcaacattagtaagaggtctcgcaataacacagagaccacaatttctgccttagaaagttccaatcttctgaaaaacgaatgaagatgagtactgaccacttcgtaaaaaactatgatgttttgtctgagagccaataaaagaagacatcttataaaggcatcacataattttgacgtaaaatagtcagaaacgttaacaaactaaccatatattcttttgtagcaacaaagtcaacagttcccctacacagctcaggcctttcatcagcatccctacgtctaccatctggaccgagattacactggtagtcacgaggagtctcatcagtgtatcctgtgcaaagagagttgatgagaaaatggatcacaaaaccattccacattatcaaaatcctaaagtgattaggatgatagcaattcaaagggagtcctaattctaggtgaattccaaattcacataatatttccttcaaatcagtaaagtaaaccagactttagttctcgcgtatagtaattatagtttctttcataacctggtactcattattgcacttgatatagcagtaacccattttatatggcttttctatacggaaagagtaataattaccacacaagttacatatgaacttccttccttggtcaatgaacttcatgaaaggattcacgtagcccttacaacgtgaacatctaacagggccactctcaccaaagtccacaacctgcacaataacataggttcatgtcagg

SEQ ID NO: 49982 - DNA, 702 bp, Arabidopsis thaliana columbia
cacccttgttctataaacattaataatacaagagctcataataaattaataacaacaactgcagatgaacctttaataagttgaccagatctttgttggcttaggtcctaagaggcttcattgagttgtttgattttctcttgagtacaacgacccaagtgatggcttctaagagcaaagcaatgcctccaagaacggcaatcactgcaatgtaagccgtcttgtacgtgtcttgtggtttcaagatgttgagacctttgaagacattaatgatcccaagggtgaggatcgcataaccgactccatggtggtagatattccaatagaatctgtacttgtgatctttcttaggccgcaacaacatcgcaaacatctatagaatatttaagtccattagaaacttaacttggtatccaaaacatagtcaaaagctttaatctttgaacatgaacataaaagggtaaaaaaaacagagcctagaacagagatcttcttgtaaattacctgaatggtggcaagggtgaagagggcaatgccgatgttacggtgggcggagaagcgaataccctcggactcgttaccgagcttaagtccggtagcccaaccggcaacaccgatgacataagcagagaattgacaagaaacgtggaggtaaaacccagccggatcggccgagtcaaatgtttaggaacgtgaatcaag

SEQ ID NO: 49983 - DNA, 1272 bp, Arabidopsis thaliana
cttgtacccttgaaggaatttctggaaattggacccttaatctggtggcagaatgacttgtacacagcatatggatcatattctagaaacctgaaatagctgtataaatcatctattgtattttgtattggtgttccagacaaacaccacctccttttggctcgaagaccgcaacatgctcttgccacctgggttctatgattcttaattgtttgagcttcatctagtacaactctgaaccacccaacttttgctagagtaccagagtcagggtcagatgaatcgccagcattattgttaccttttttcttcttactcttcttagtagtacccactacatttttccgtttcttattgatggagaagccagaagcgagaccatatttttcagaatttttttcatcattctcatcgtcatcaaccaggggttgctttggaacttcatttgaaacaatggcgtaagttgtcataaccacatcatattttgctagttcaataggatctttggtcctgttaccgccgtggtatattaaaacagaaagtttggcttcatcagtaaccttctcatcaagttctcttgcccactgccgcacaacacttgctggacaaacaattaaagtaccagcagctggtctctttctgttgaatttgcgtgttgaagtactcgcttcttctcccttggctttctttatgcctgaatcaccattcacaccactaccatttgaagccttagactctggtttctcaaatgcattttctgactcatcatcagcatccagatccaatgcttcagcctcttgattgcctgaattcttggactttaattttgcctcgtgcatttgctttaggataagcgcaatagtcgagactgtcttaccaaggccctgtgcagtagaccaaatggaatttgagggaaacctagtaagatcatagatagttaagcggaaaataactacgattaaaagtaacctgatcatcagctaatatccctcccatacagtgcaaactattagtttccttctgaaacatccatgccaatgcaattttctgagaaacaacagtgttaagtacacaagaccattctgacagatactgaaagatgatgtaaacctgaatacctgatgcttcataaggggaacgaaagaagaccagcaggtaaatcgacctcggacttgggttgattcagttcctgcagaaaacatgtacttaattatcagaagtttaagcacttatcacaccaattcatattgtgggcaaaagtctttattttta

SEQ ID NO: 49984 - DNA, 792 bp, Arabidopsis thaliana columbia
caaaaccgtgttgagtatcttaagctgcatcaagtttttgtctctgactccatctagcgatacgctgacttctctcccagctcccatcgccgtcgaacaatctagatattcgacgtcgtacggacagagaccaaagaaatcaagggaagaaaaagctcgagatttaggggaaacccaaaaatctataaataatgttcgtgggagagagaatagactattgggcctataattcattctgggcctggacaaaatgaaattctaatacatagttttgacgcacaacagagatcagtttcttatttatatgaccaaacgattgggcttggaatattgggcctggaatcatcccacatagttctaatcctcttatccacccagaggtttcattaagttgaaactctctcttatcgttaacaatttgtgaagcagaagaaacatttgatttgatgagatggggaagaagaaagggaaagcgatcatagtaggaggaagtatagcaggcttatcttgcgcacactcgctcacgttagcatgctgggatgttttggttctcgagaaatcttccgaacctcctgttgggagtcctactggtgctgggctcggactcgaccctcaggctcggcagatcatcaaatcatggcttactactccacagctcttagatgaaatcaccttgcctctctcgattgatcaggtaataagaacactgagtttagttcgcaattgaacaacggcgtttagttttccagtctactaaagtttaacttttttgtgtgtgtgggttgtgtagac

SEQ ID NO: 49985 - DNA, 604 bp, Arabidopsis thaliana
ggtattataaaactcggaacactgaaaattacaaccaaccagacctaatatatggacagcagaatcacacaaaccttttcatacaaatatttacaacaattctgcagtaatatgtacgtagaaaatgtatgtaacaaatctataggagaccacaaactctagataatttctaagtgatttaactccactgcggaaacgcattataatagctagacgcagacgcagacgcgaaactgtaatgaggatttggctgaaggaaaacgtcaaaagaattggctggagtaggagagagtgctacgtcagcggtcgtggcggttgcggatgcgtctgcgtcagggatgttaacagtggtgatatcgtgaatacttgatcgtcttttgtctttaccatctgtgagttgtcgaagaaaatatttctgagcgtgtgaagcgacttgcgtcggcgttcgagtcgtcacaaagctttttgctatgtttctccaatctcctttttcatatttcttcaaacccatcagaaatcgtctgtcaaacaaagaaaagtaaatcaatattatatttagttacttcacataagataaataatttcacagaagtatttgaaaata

SEQ ID NO: 49986 - DNA, 1812 bp, Arabidopsis thaliana
cattctggttattaggtccaccaaatctggaaaaccaatagattctttttatttcttctgcaaaaatctcagagctaccctaaaaattctctctttttgactcacttaccagatctccactagattttactcaattctttttcaaaaggtttaaacttttatagattccttgaagtgggtctaagcaatgcttcagagaaattccgatgatttcttctctaaccaaaataaaaatgaagtatcatttgatagtgatttttgtgttcttcttttgattctcttatctcttccttcccatcaataaacccaaaaaaattaatatcatttttgggatcttattgatcccaaaattcgtaaatccgttgacctttgtcggcatgatttgttcttacttaccgtaaaaaaaacagagctaggttttagttttcggacatggaggttatgagaccgtcgacgtcacacgtgtcaggtgggaactggctcatggaggaaactaagagcggcgtcgcagcttctggtgaaggtgccacgtggacggcggcagagaacaaggcattcgagaatgctttggcggtttacgacgacaacactcctgatcggtggcagaaggtggctgcggtgattccggggaagacagtgagtgacgtaattagacagtataacgatttggaagctgatgtcagcagcatcgaggccggtttaatcccggtccccggttacatcacctcgccgcctttcactctagattgggccggcggcggtggcggatgtaacgggtttaaaccgggtcatcaggtttgtaataaacggtcgcaggccggtagatcgccggagctggagcggaagaaaggcgttccttggacggaggaagaacacaagtaagtctctgtttcttcttttacacaaaaaagaaagaaaaaatctctgttcttttccggtttattgggaattgacattaaaccggaattagatggttttataccggaatggtgaaatttaaatctacttaaaaatcagctcagtcagtggtgaaattgacataaatgttggtcactaatcatgcaaggtagtaaaatagttaaacataaatcagtgacatgattgattggaaaaatatccaatatttaaattactagttaatgacaatttgatagtataaatgtataacactgtggttgtatataactttatgaaaatatcttagattagatatttctcacaatcgggctatttctaatttgtttgaacaaatgcattgcataatcgtagtatgatttatgcaacactgtttagctgcaaaatcttgcctaatcacatatataacgcatcaaacctacaaagaacaatttatttgggtcaagattgtatgtagatatatttgattccatatttgtcacaattcaggctatttctaatgggtttgaagaaatatgggaaaggagattggagaaacatatctcggaactttgtgataacgcgaacgccaacacaagtagctagccacgcccaaaagtacttcatccggcaactttccggcggcaaggacaagagacgagcaagcattcacgacataaccaccgtaaatctcgaagaggaggcttctttggagaccaataagagctccattgttgttggagatcagcgttcaaggctaaccgcgtttccttggaaccaaacggacaacaatggaacacatgcagacgctttcaatataacgattggaaacgctattagtggcgttcattcatacggccaggttatgattggagggtatacaatgcagattcttgctatgacgccagaacacaatgt

SEQ ID NO: 49987 - DNA, 578 bp, Arabidopsis thaliana
tagttgacatatgcatctaagactctctatatgctcctacaagtaaagaaaagagactacaatggctctaggactgactacaatggctacagggaaaatgatttgacagagaaacccatttcaatactactccaacatctcgaaattggaaaccagaagtgaccatcttcaataaccttaaacaacatttccacaatgtaatcaattcagctaataaaccagtgacaatatataaaatgaggcatcaatatagcaaaagattataagtaagagacaaaatccagaatcaattccaaaccaaaaggtcttaaacaatgatccaaattcattctagaactaaacaaaaagtagatagatagataaaaatctcaaaggttcttcttcagaacctgagcttagtaaagaaccacctgttcttcccagtcttgaaacgttcctcaagcttagccttagcttcctttaaagcagtcaccttcttatccttactcttaagagcatcaagagtcgctacttccttcagatctacatgcgagcgtgtacgtgtaggcatcagatgctggtaattcacgagcttgatg

SEQ ID NO: 49988 - DNA, 499 bp, Arabidopsis thaliana
catgcaagatacatttatttaactacagttttgaggtttttccatttatgatacaacaaaagttctaagctaattttgtttttgcttgaatctgttttgtttgtaggctccagctgagcttgagaagagaaagcacaagctcaaacgtcttgttcagtctcccaattcctttttcatggtaatgtaaatttgaaacctttctccttcttttgaaccctttaggaacaaagtctctgtggttagaatctatgtaactactcgactttgtgaattgtatgtaagttttgagtctgtgggagacgtgggaggtcatcttcttactctagttcaccaagtcatctttttttttgtgtgggtttctctgttaaatcattctccctgtagccattgtagtctcttttctttacttgtaggtgcatatagagagtcttagatgcatgtttgagttgtcactgttgattacttcagttcatgttgaggttatggtgttaaaatagag

SEQ ID NO: 49989 - DNA, 509 bp, Arabidopsis thaliana columbia
ttacgaactcagtactcagtgttctcagctcacacactctttttttgttctctttcttttggacagctttcattttctcttttcttttttctattttgtttcaaaattccatccatattaaaataggcctgatcatgagaataaaggaaatactaatgatgagtttctcaataatgcaataagatgcaattattatgagctatttactattgaaaatgagcaaataaatgtcaaaacacaatctggttaagttagagcaactccattgtataggattcatgtagtttctaagaaaacaaaatgtattaatattttacttttacatccaaaaaaccaacttatatgagtaatagaaacgatcctaatattaggaattttagagattttctctcatctgtttcttaacttttcaatatttttattttttaaaattgtatgagtttctactaagaaactactgctggagttggtcttagcttcccaatgcttctccacctatatatatgcat

SEQ ID NO: 49990 - DNA, 538 bp, Arabidopsis thaliana columbia
ttgtgtcaaacaaatccttcagaatcccgacgactactgctccctactcgctgaattcaatgtgtcaaaccctaaaggattgctttgcccgtagaatagatcatgctcggaggcggaagcagaggtggtggtggagaagcgatggtggaccatccggaacgattgcagtgagagatgaagtgttgaaaattggacttttagttttgatttggaatattgagattcccgtaaaaaaattggttttgattttggaaagagagagaaatgaggacgatgtagaagagagttgagagagacgacgtcgtgcaatgtgattaaaaggacaatttaggaattttgatttggtaaagtgccttctattttcaaagtgcctaatcccgtaaatagttttctaaaagtgtctcatagtgtaataacctctttttcaaattcctttgttgttggcattccagattaaacaaaaaacagtcgaataatcaaataaacggatgggaatgtgacacgtttaggcatttttaaagaatattattccttttga

SEQ ID NO: 49991 - DNA, 1315 bp, Arabidopsis thaliana
tgagtagtgttctctaataataccatttgcattctatggttaataattagagcaactccagcgtatagaattcatgtagtttctaaaaaagcaaaaagtattaatattttacttttacatccaaaaaaccaacgtatatgagtaatagaaacgattctaatattaggaattttagagattctctctcatctgtttcttaacttttcaataaactattgctggagttggtcttaagggtggctaaatatccgtaatccgattaattaactcgattataaacaactaatcggtagttgagttcgagatccttgagccacattaaacttgatttggttcaaggttcaagatttcatatttttttcgtatttgtatagattcttggaataataaatgaacttttagcttcaaaatctcagtctctttccatgaatcttctaatgttttttaccaaatctttgaacaaaatctatacaaattaccaatatcacccttcactcttctccaacgtagtagatcctctcctctccccctctttcctcctccctccaccgcagcaacacaaccagctaaaacaaccggaacaacaacaactactccggcaacactcggtgtcggggcattttagacatttccaacaagagcatttcggacattttggcttcccaaagcagctgctgcatttgaacgtgggacagcaacaactactaacacagctcggtttcttgcagcaagagaaacatcccttcaaagtcggacacgaacacttgaaacaaccgcagtcgccacaaccgcagccgcaactgcaactaggtttgggacaccgaggtttgggacaactgcagctaggtctgcacagtccggaacaacaacatcctgtggattcatctcgccgacggatttcttgccaaatcgttttgagacgagacttagtggttgtattttccatgtcttgtataaaccggtataggtgtctaatgtagtccggatatatctcaaggttgcaatgtccaccgcctttaatccagagcggttcatacggttcctttgccattttccaaagcctgtttccgtgtaaccaattcaccacatcatcctctgttccctgtgtaacaatagacagtaagattggtaaagttttacggattcaaatagggccgaggctaaggacatggatatgagacagattttgcttacgtgtatgacaagaaccgggcatttcaccttcttgatcttgtttacgttctgcaattaaacattacaaatcagtaagaggatagtgttagaaccccaagaccggttaccttacaaattagct

SEQ ID NO: 49992 - DNA, 577 bp, Arabidopsis thaliana columbia
tagtaggagatcaccaattacggaaataaattaataaaacattgtaaattcacgcaactaatatcgggtgtctcagtcaccattcgattcattttttaaggcagcattgtgaagtcttcacaaaaatctaaaacatcaaatgagtttaagaactgaaattttttctaaaaatgattgaataaagtttaaaatcccatattttattccaacatcaagagaattttttaaaacccacacccggccggttcaaacggttcaccgggtcacgggttaatggtgaatttttgagggttttttcggttttgaacttgtcgggattttagcattaaacccaaaccggaaaagtgttcgggtcacggttcaaccggtcggaccggacggtcgtagtcgggcgtgaaaacgctgagaacctcacaaattttccaacacaacctcccattggagatgctctaaatatgttttgaaagtttcatgcactctcactgaagttacttgtcgacgacaactaacaaataatctctccaaaattcatttgaatttcaaagaaacatcaaattgcatattgcactatatttgt

SEQ ID NO: 49993 - DNA, 585 bp, Arabidopsis thaliana columbia
  unsure (1)..(585): unsure at all n locations
tttaaactgctaatatttcttgcaaatattttcttgcgtttgatttatttgtgtatgttgttggcatttttggttgcaagttctgtttttaatgaatctgattggtcttttctaaatactaatcgacttcatccttatcaaatttgattggtttcatcatttgagctaattctatctgattcttgtacattattttagtattcgtctatgtttgatgacatatcattgatgtgataaatgcaggtgattgaaaatctttaataggagctgccattgtgtgttgaatgggtatcacgtactgcttctaagtgatccaaatcctgcttcagcctctggacttgttctttcttctaagtgagccttttggtaataattttccatctgtaatgagcttgattgcttgcagtgttttctttgcgtctcttggtgtttgtttggttaaatctgtttctttttctctctgagagatcatcacaagtcaataaatagatcatgtgtttcagatatgctcgtttcatgcgtatgtatcatgttttatctatgtntggtaaaacttatatacactgaagatataagattttggag

SEQ ID NO: 49994 - DNA, 796 bp, Arabidopsis thaliana columbia
ctgtgatgaaagtctctgtgacagcatttccatcaagattgtaacttcaacacagttctatgagtaaagaaactatctaaaggaagaatctcgatggcgagggatccatataactatcgtaaatgactcttaacatcataaagataaaactaaacacctaatcagatgtggggaaaaaggttatccataaaacaaggattagtcatgcttcagagaacacacaatacaagcagcgaaccttaagaaatattagtctgcaacattacgatacggttttcatctaaagatgagcaaaatcctgaagtgaaagtgtatcaacaaactcagacattcacaaacactcatatagcagagaaggcataatctgaagcagatctcaatggtccaagctttagtgcttgatcaaaaagacctaatgattctaaactcttaacttaataaggaatcgttactactactagtaaccagtaaaatctttcccaaatcgttaccctaattgggattttgggacaaggcatacaaaattgagaaccagtgaaaacgctagattacctccgacggcgagattgacggtaaggagaagcggccagacatatgtgtacctacgagcgaatgattccttaggaggaggcggaggaggaacagaaccaccacccatcgtatacgaagccgccgctgctgcagctggagacggtttagatgatggaggatcggtgggactgttgaaattggcttcaacgtgcttaagctgagcgataatggctggatacagatcacagatcgaaatggagatcac

SEQ ID NO: 49995 - DNA, 778 bp, Arabidopsis thaliana columbia
ctctctactctctttcactattttacgttagtttctgttatttttctgataattccagagtttatagagattgacttatggaagttctgtttagttctatgtgcgttctaagaaagtaaaagattgctagtacaaaaaacaaaataaaaataacaaaacttacgagttcaaattgatagttagaattctttacgtccactaaaacctttgctccaacttcttaacccatccctttccattttgctaggaatatcggtgaactgtctatggtagaatcttttaggcatggtcaaatcatacttatgatcatatgatatggctacaaattttttgtcaatgtccatatatagccatattagttgattgaataagaataagtgctattatgtctaaatatttaccgttggtttgctatgggtttactctagctatccgtacgtacgtagccatggttcataaataacgacgtccaattagttaaaatcaatatacttaacccaatcttttttaaaagaaaatgctatgcagtgaaagtattcatcatgatgtataaagattaaatctgttgagtaatagcgtatcgaaactcattgataatttaactcaatttttttaggtttggccaaaagttgggtgttacatacgttcatacaaaagaagagataaatctattttgtcaatggtcaaagtgtttaactaaaagcgttaagacgcaaatacattttaaagaatttcaatatttcttattaatatggagggtgtatatgcagaccattgt

SEQ ID NO: 49996 - DNA, 866 bp, Arabidopsis thaliana
ttgcagcttataacaaacgataagtttgtaagtgtggagcacagggttttggcaaatagaggcgaagaacctcgcatttcaagcgcatctttcttcatgcacaccataccaaatgagcaagtatatggacctatgaaagagcttctatctaaacaaaaccctcccaagtacagaaacacaaccacgaccgagatggcgaggcattacttggctagaggactcgatgggacctcaccgttgctccatttcaggatctgacagtaatggtggatccaaatctcagaatcagaggatttctagagttttagtataaaataaaggatataacaaataacaaggcatgagaaattatgcttatttcacatatattatcgtgtagccgtgtaggtgtatgcaacaatctatagaaataaaccatcagtatcttataaactttcattttgttgttcttgagttgaggtatagctagaccgcagtttcagttaaatattttttcaagtacttccgtctgaacataatcaacctaagaagagatcataagagaatattacctcagtagacactacacggctttcaaaaggaaatgactgaatgtcgcagatgtgatatagctgtgtccctttcagactcttctactgttccaagtctcctgcaacataacatgtttatgcgtcattggttactatcttcaaatcccaaaatagtttgaatgtgatctgacaaaaacataagcaatcacgtattactgtgtaaggaaagagagacatataccttggaggaatgaaaccttgaccaccttcttctgaaagtgccttctctaatctctcttggctttctttagagcacactggcggacgttactgggg

SEQ ID NO: 49997 - DNA, 890 bp, Arabidopsis thaliana
  unsure (1)..(890): unsure at all n locations
ttttaggttgtcaatccaaatgggtgtgatgctaacaatcaagatgtgattagaagtcactaagtgaagccaagcattaacaggttttggtgtgttctagcagtcctaagtgaacacgcagaaaacagaaattcaagctgaaacaagaaaacactcgaccaacacagctcattgtagagcactgggtgtggtcgagtgccaggtcgggtaacagacaataaatgaaacaaagacactcgactgcacagtctcttgccagacaactggatggtcgagtatcagagtttttttactttcttttactttctcagtctcatatccttctcctgggatcactttatcatctccagagtttttttcatcttcttttgactcttgtggagttttgctgatgtcgaactgcaacttgatgtgctttccaaggttgagacttattttcccttccctgacatcatcattgctcccattgtggctaggaagggtcttcccaagattaggggattcttatgctctacttccatatccagcaccacgaagtctgtaggcacttccactccattaatcatgactgggagatccntcagcatgccgaaggttttcttaaagatctatcctcaaggatcaaagtcaggtcacaaggtctgtactaaataagctgacattaagctgacagaggctctgagatcgcacaggcaatcgctgaaagctaattccccaatggaacaagttagagtaaaagatccaggatcttctaacttttcttgaacaatcttcttatcaacaactcgagatggagaagcatcacattcatcatctgagtcgtgatacatcttgatcctttctagtatcagatttctcacatctttgtgaggatcaggaatgaggttgag

SEQ ID NO: 49998 - DNA, 525 bp, Arabidopsis thaliana columbia
agcatgatttggtgaaattccaaagccgtcagctattctctgctttggtactatcaacaccatcaaataggtaagcatggtaacaaagaattgtcccatcagccaatactgcaaagagaaatgggcgtgtatgatgcccagaccatctttgcatagctaactcaacaacccttgtattctttatctcttttgacgaagtattatcctcggaatttttgttgagttcatactctagctcatgaataggcatatcagagaggtggcgtcttccagaggcaaatttatcaacagagaaaacacaattgaaactaggcacatcaaatatctcaagggcaccactttcgtaacagaccacacagtatatgtcaccctgatcttgaggtccacatcaacactatcaacagcctctccaactcctgacgaaagccacgcatcagtgctagctgtccttagccatggttctggtcctttatcatggtacaaagtacaggctgatatctttcttttagagcgtcaagtacagat

SEQ ID NO: 49999 - DNA, 439 bp, Arabidopsis thaliana columbia
taaccaaattataatcgaccctcctcccactaggaacaccacttaggcttgccaaccctcgtgatattgactaggtcttatatcactaaacactcggctgcctttaagaaaacactttatacatagtatatagcttatacttggcaaagatttacccaagaatatatctttatatcagatcctcgttaaaatttacataataacaagtaattttgcagaagcgacgtaaatcatcctagttccggcatttcatagtgttcgtctccccgctatggtcatcccactaaggttacctgtaagacaagtagaatcatgagtaatctaacattactcagtgagttgggtctatgcacaaataaatctctaggggttaagcacttaataggtaaacgtatccatcagggatcacagagtacataataaacgaattatcatatac

SEQ ID NO: 50000 - DNA, 544 bp, Arabidopsis thaliana
taaataatttggaaaagaaagggttatatgtattttatccaaacaaaataagtaagataattcgttaattatcatttctttttcttttttcgagaagaaaactaattatcgtatataattatcatttgaaccccctatatagcaatcatctctttcttttcatcgtctcttcatttttctcctcgtagacggagacatcaccgatgtgactcgaggggttgatgattaaaaataatggttacgaaccaaaactgatagtaaagaagacgttatccgaatcggatcttgcttctactctcttttccacgacaattccgattacgtcgaccctcatccaggccccgtcgactcctctctggacgaaaccgatgccattgtcaaacatttcgacgcctgatgattcctgacattgaagctttatcgcgtggactttttctcgttgttgtgccatgcaagtacagtaaaacctttataaattaatattcgataaattaatcatttttataaaataataaattctttcagtatttgggactagtgtaaa

SEQ ID NO: 50001 - DNA, 574 bp, Arabidopsis thaliana
tacgaaataacctcgttgacttaataaaactacagtatccaaccaaagtccacggttagctccaggatccgacccactgttactgggttttcccccaaataatttttttttaacctaagtaacttttcaaaaatcaaaattgtcgactcttcaactctctcgtttcgattccggcgaacttcaaaaatccaaaaccgtcgactttctcttctctctccgttcagttcaccgtcaccggtgatatcacttgttatctcctttctgcatcttaaccatcgccgattgtgtgggtcgtgttcgatttcgcataatcgttcgtttagccgccgttgaaattccgccgtgaccggtgctgttccaaaccgtcgtcgttccaaaccgccgacgttccaaattgtaagtgtagaatagggcatttagtatagaaagtgaaaagtttttgatttgaaacattagatttggtttttgttgtgttgatttgaacggtttccttgattgttgagtggttttgcaaggtaatcatgggtcgtgtaaggttagtcactcctagttcgagtgaaagtgacgatgagag

SEQ ID NO: 50002 - DNA, 555 bp, Arabidopsis thaliana
gtctggaacgtgctcacatgggtatcttcaccgagttaggagtactgtacgccagatatcgttatgagaagcttatggaacacatcaagttgttctctactcgactcaatattcccaagcttatccgggcctgtgatgaacaacagcattggcaggaacttacctatctttacattcaatatgatgagtttgataatgctgcaaccactgttatgaatcattctcctgaagcatgggagcacatgcaattcaaagacattgttgccaaggttgcgaatgttgagctttactataaggccgttcacttctacttgcaagagcaccctgatataatcaacgatcttctcaatgtgcttgctctgcggttagatcacacgcgtgtcgttgatattatgcgcaaggttagaggctgaccattgatttaatattttctgttaaaaacttatcaccagtggcttaacaatctatatgtgatgattatttcttgtttctgatctcaggctggtcacttgcgccttattaagccatatatggttgcagtcagagcaataatgt

SEQ ID NO: 50003 - DNA, 786 bp, Arabidopsis thaliana
gcttgataagacgcaagtgaccagcctgagatcagaagaaaccaattgttaagtaatgtagctcagttgtttttatagaaaaaaacaaagtcatcagtcagcttctaaccttccgcattatatcaacaacacgagtatggtctaaccgcaacgcaagtacgttgagaagatcgttgattatatccggatgctcttgcaagtagaagtgcacagccttgtagtacagttcaacattcgctaccttggcaacaatgtctttgaattgcatgtgctcccatgcttcaggagaatggttcatgacggtggtcgcagcattatcaaactcatcatattgaatgtacagataggtaagttcctgccagtgctgttgttcatcacaggcccgtataagcttgggaatattgaggcgagttgaaaataacttgatgtgttccataagtttctcataacgatatctagcatagagtacacccaactcggtgaagatacccatgtgagcacgttcaagcccaagtccactctccataagtgagattaattcattgaagcaccctctgttctggtagtactcgctgacttcttccaggtcatccacctattaagcaccaaaagattaaccaggaaataaatgagatacattgggctataaagcatacacaattgaaatctaaaacctgtaaggggaaacttttgtgctcagtaagatcaggtattcacctgaatgataatgttaagaccacatatttgagccaaccggaattcctcagcatcaacgcaagcaaagca

SEQ ID NO: 50004 - DNA, 525 bp, Arabidopsis thaliana columbia
gactctaccactcatatagtttttattgatcaaaatatgaatttcagtatgaaagagtctcaaactacctaaaacagtacggaggtcactcaatgcataacgtcgaggccacaccctatctccatggtccatcaaaccatgcatcaacgtccaagaaccgtccagcattgtacggaacctcttctaaccgtctccccgagccttcaagcatatttagaggaccatacactcgtggaaacatgaacaccaccgcaccgcctcagccgcgaaagcgctggaaatgcagaatttccaaccactatctcaactggagaaaattgcaatgttggaagcagcggaaaaagcggtgtcagaggttttgagcctcattcaaatggatgatacaatgtggaaaaagtcgtctattgatgataggctcgtcattgatccagggctctatgagaaatattttactaagactaacacaaatggtcgtcctgagtcttctaaagatgtcgtggtggtcaaatggatgctggaaacttg

SEQ ID NO: 50005 - DNA, 572 bp, Arabidopsis thaliana columbia
ttcaattttgtttggcaacaactcaattaataaaaagaatattatatctagagatgaaggttcgatgtcgaccaaaaaagaaagatgacggatcaatgatataaaattctttgttttttttagggtgaaagattatattatttcatatcatagtttttgtaaccatcttccctgatttaaaaacctctgccttaagatactctacatgcctcttctcctcatcaagtgccttatcagcttcttctctctcttgagctcaacttgcgcaaaggcatagcttagctgaccaactttgcagacaaacttatcgtcaatcttggtttcattatcataatccttttgtagcctagccaatgcatgagttagctccttgttctccttcaccatgaattaactgttcctttcccattagctcaatatatcaccaatctcgctctctctatcacgagacactcttctgcttgatttcgcagccatatgagggccagggaacacatacattctccttcggcttgcattccaaagtacaatatggactatatcggtactatggctcgacgcaatcagaggaa

SEQ ID NO: 50006 - DNA, 1041 bp, Arabidopsis thaliana
gggccttgtcaatttatatgggctttaatgttttttttcggggggctttaacgttttccaaacgaatataaatattttaggtagccataacttataaattctttgggccatacattttcaaatttcaaaccatgagaccaccaatctttaataattcacacaaaatcataactctctttttcataaattgttttttgtttgccttgataaaattttattacacagtggatcgtggaaccaaacggccacggttcaaaccacaaaggagattgaagaagggacgtttaggcctcctatgaccgttactaacgccgttaacagtagttaccctctggacgctcgtagtgttaccaactcgtataggagtgacagtgagagaggcagggtcagcggttcgaaggtcaagccaattgatgatgtcagcaaaaacaaggtccacgttacagtcaggctcacctgacgtcagagcgtgccacatccctggatacaacttgagcgtcttgtcccttgtgctagctttctcgtacagagctttgcttacctctggatccgtcactgtatctgcttctccgtgtaatacaaagaatggcattgttatctgcaatatcatgttgtcttggtcagaaataatgtcataacacgggatcaagaacaatcaataagagacatgaacctcgtggagagtgtcttctaggttcatgcttgtcctaagcatctcaagtgcggttttgagcctaggcttgtcttgatatatcagcttgttgttccttacctgcatttacacacaccaaattatttacatataaccaatttcgatggtgatcagagggttggtatacactatacagacctcttctcgcttgacgaggtccttgaaagcagcgtcaatcacgtcttttgttggaactattttccatttaggtatgatttcttcgactctagttaacagattaatcactatagggtgtggcttcaccttctcagatatctgcatatttaaacataacaatatactttgcatttcaatattattatcacctg

SEQ ID NO: 50007 - DNA, 2081 bp, Arabidopsis thaliana columbia
  unsure (1)..(2081): unsure at all n locations
gctaagagattgtgagacaatttcaaattaactctcttattttttctgctctctttgtctccttcatcataactacatttaatattcttacccatatttatttactgcaaaatttattcacaaagttgagtagtaattatttatagctgaaaagaagaaaaaagctgagtattaattttggttagaatttttttttgtgtgtagacaaaggacaagactgtcttaagcagtagatacgaaaatactttattagttatgttggtctgaaactgattagacctggtcaaaccaaaagctcctttttaatcaatcttttgaaaaatattgcctcctgagccacgccttttaccactacttaccataataaagacagagaacaacatatgtgtatgttccatcataatttagattcccatttgtttgtttgtcatcaaccacaatcattttcagttcccctgtgtcctcttttttacagacaaatctcagagaagattaatctacaagcatttgtctctatatgcccctattttatgtgtatatatattgttatttttcatagttatttgaataataccttgtgaaattaaatggccgaagtccatacataaacgcatatgatataatgtttaggccgaagaaagcccaaaagtataaataattaacagcccatatagttaagacactcgtcgagctcgtgtccttattattagaaaggaaacctctcacaacatcaatttcattgcaacgtcacaacatcactttcaagtttcaagtgccgatttagttttcctttggcctgaacttgcaagcaatcttgaggtcttccgggggtttgtccccggcgaatccagcgtcaacccaagccgagtagcctccccccatgttagccacatggtcgtacccctacgacatgacatgtatttttgaataggtatacttattaattgtgtgtatgtgtgtgtatatatagacgcacctcgttaagaagatcaacgcaagcacgacttcctcttcctccagcgttacaagccttcacggtaacatagttagactatttagtataaaggaaatggtctaactaaaatctaaatctaatgtatgaaaatacatgtcatcactaattaaatattagagtctaaccacgatcaaatgttcatctttcttgcaaaccgatgccacttgagaaaggaaatcaggatttataaccctacctacaaaaccattcacaatacataattctaagtgttatttgtgatcaaaatatttaaaatgaaactcttgcttaaaattttaaaccaccttcatctgttttgaacatataaggaatgttcaaagcctcctcaacatgactcttggcaaattcttcatttgtccttcaattaccgacaaaaataataagatttcttacaaaaaagaagaagaacttanatgatatatttttctttatacttaccttacgtcgagatatcggtgaccagtactaagaaagcctttagctgtataaacatcaacggtctcaacatcttcaacgctgtagaaacaaatcgacaatagaaccttcatatatacggaattgttaataaaaatcaataaaaataaaagttttttcttgactcacgtctttggttttgtttcctccatgagaaagccttcggtgtgatctgtttttcttttctttctggtttgtcttctgcaatgagaaaggttgaggagagaatatgtatacatacaacttacaattattcaacttgatcatgtgtatttattattaacttaatcgaggtgaaatattatagaaattaatatagaagttgaccaactattattttattattttgtaatgatcgtgaaagttgaagctagagaaagatgatttaagaacaaatctcaaatcagtttattagttttaaacaaattggtaaccataagaaagtactagaccacaactataaaattattaatgtcaagaagaaagcgggtctcacgatttatatatgcatttcaaaagtcgcaatatttcaggataagaatccaagaacaagttttccaaggaatagtggcttttgcaaggagaaacaact

SEQ ID NO: 50008 - DNA, 1075 bp, Arabidopsis thaliana
tgcagagatcagtgacatcaagagatagttgagcatgccaatcaggtttctgaatcaaccaaacagctctatcgtctttactttggtaaaaccctaatttcctcagccacgcttcgatacaaggtaagctatgcgaatacagtggcttgttcttctctggtagcttcttcagccattcgtcctccgtatctgacacctcctccgcgtctgaagattttgaagatactagagttagaggcttcctccgaattgtggaagaagaagaagaagcgaaactacgacatctgggagaaatcgaggcttttgagctcaaaatgtgaagaaatttcgcagggattgatgattgtgcacatggaaatagagcacttgaaggaacaaattcaaatgcagaaacacagttcatgattacgagaattttctccgagaaaattcctgattttcccaggaaaattcttgcagaaaggaaaaatctgaagcggaggaagttttcgtaatctttgttctatcttcaattttgccacgtcaccaaattaaaactcttgttgggccattaatggccttatgatgtagtagtaagcaagacccaataaattgacaatctaatgacgtggcaatatgtttcccgccaaaaacataacctcgtagctcactccctcctctcttcttcaacctcaaaaccaaaatcgaatcttctctctctctgcttcatttcaatggctggagatttgttatacgccaaaacgcagcgttttgtgcttttgatagatcttaatccgcttctgatcaaacccaattcggagcaatacctagccgtcgtgatctccgccgccgagaagcttctcttatttcctcctttatctgcttctctcttctctttcaaattcttcttttcttctctttcttctctcttatcatcctcaaagctctcgtcactctcaatttcatcttctccgctttcatttgaccttcctaaccctacactcgtctctctcaaacgcgccatcgacgcggttaaaggatatgaacttcgatctagctccacggtggcgacggcgcatcgcctcgtggggttaat

SEQ ID NO: 50009 - DNA, 1036 bp, Arabidopsis thaliana
agcctccctatacacatgtgtgatttgactctccagtccttcgaaagaaagccataacacaaacgtactaggaaaaacaagggatgtgtgtcgcttatcccggtcttgagaaaccccaccactatctccgaatcaacctctaactccagctgaggtatccgtatcgcccacgcaaaatataggccatagtacacttcccaaagtctcgcaagcggagcggagcatctccctatattagctgcaaaaccaccacgccaattgccttcttcatcccgtaacactcctcccgctgttgccaaccccggattacccctcgacgccccatccgtgttaagcttcacccagcccacgcccggagagccccagccaatcagcctttccacccggttgcgtcccctgtcattccctgcccgactgccatgagcttgaaacacctctttagccacattcttcacaaattggactctatccctgcactttctattctcaccgaacacattaccgcatctccatttccagccccaccaaactcccatagcaaacataacagaccatgggactccgtcaacaaccgcatcatcccccaagtttccatagacccactcaaacagcgacttcttgaagaactcatgtcgcttacgtggtggaacaattcgtaaccaaatcccctccatagtcggacaatctctcaaaatgtgcatagccgactctactcctcccttgcacacttcacaaagatcagacgcacacaaatgtctacggtgtctttcctcatttgtcataatagcttgattgcccaataaccaaaagaagacacgcactctctctgggacttttatcctccaaacacgaccgaaaagagctcccatatctggtctcggtgtgtcatctcgtgtcaaaaggccgtaagccgacttcacagaaaacctaccatctgcctccccgctccaagagatcatgtctctcgcacctgtaactgagtcaagaacaaccgcagacaactctaaatgggtattcatagagatatacggtagga

SEQ ID NO: 50010 - DNA, 1206 bp, Arabidopsis thaliana
tgggaattggaacgaatcggtaagcaatcgtagtaaaattcgtcaggtgcgtcgaggaatcgatcgaattcgtccgtggtgctagggtttgactcggactcggactcggagtccattgatggtgatgataacccagaagaagaagaagagattgcgtgagtttggggaatttctaaagcatcggtggcgataagcgtgatagctcacaaacggcgtgaccgagttttttttatttaattttaaatttatttatatacgtcactctttggcctttgcagtcaataaccggagcggaccatcaaaccggataattgagaaccgaagataaaaatgaaactaaccctagggaagttactatttttttttttggtcaaacaggaagttactattaatttctactaatgaatacagatacaaggtatctgaatctgagagctgagattagaaagtgattgtttggtgggttagttagatagtcttccacaaagatatgagtgttggactgaaatttatctcactaatcaacttttagtgataaaataataaaatagtttacaacgtttatataaatgtttgttctttacttattttcccattcaatcatagcaatatactttacttattattttttaattaattaattattttacttaactatttatgacaatgttactgttgatagagattgttttgtgttactttatatttaatttcttttcttaaattaaataaaataacagattttttttataggattagtcattaatcgaaacaaatctttgggggatgtattatggcctatattttgcgtgggcgagacggatacctcagttggagttagaggtggattcagagatagtggtgggttttctcaagaccgggataagcaacacacatcccttgtctttcctagtacgtttgtgttatggctttctttcgaaggactagagagtctgaattacacatgtgtatagagaagttaatcatcttgctgatgggttagctaactatgcattttcgctccctttaggtttgcatttttatgatgtatgtcctgacggtttgtcgtcttgtttatctgacgatgctcgagggtctgcgtaccgcgtaaagttcttttgtaatatttttttgttcttttcataaatttgtagggggcattgccagtcaccttccaaaaaaaaattaacgaaacaaatagggttg

SEQ ID NO: 50011 - DNA, 1306 bp, Arabidopsis thaliana
gagtgatgtgcaatcaaatcacatttacaatttggttaagttttgtttgattttggttgatctcggttaacaaaattaacctgttagtagtgagaaccttttgaactttgaagtaatgctctttggagaaattggatccggcagaccaagagcttagaggctgaagtcaagggatatatactcgtatccctaagtcatggtgtcgtgtaagaccttcaagaactcgattttgaacaaaagagctctatggattccgatgatcgtatgctactaccgcgcatgagatctgaaatcccatagctagaagagccccatggattttcaaagctagaagagtgagtcccatggattttcaaagctagaggactcttatggattttaaaagctagaagagtcccatgaactcttctcctttactaatcacacattaacatagcatttcataaaaaccaatttacaatgcaaacatagctgcaaagaaccccccataaaccataatccacacatcatgaaatcgatgattagtactcgttaacaacaaagaaaactcaactcatattatcttcctttgttaggttgacagctatgcctgaaatcacaaatttaaaataagaactagaggctatgtgaatctaatccaggacagttcttcaaaaccaaatccaatactcaaagtctcaaacatctacagagctcagtaccagtgtacgaattcccaaattaaacaagttcatcctttgtttatcaacctgatactactaagtactaataggcctgtctgaaatgtaattgaacaacaagctcaatggtcaataccaatggatcgaagaatatatcagattcaaaaccaactgatcgatcaagagagtagtacattattataactgacaaacttgttcttgcaaagggattacgagttacaataacaaaagactatcaaagattataaggaaaacacaaaggatacaaactaccaacaatatcatcatcttcttcttttcaaagagattactgcaaaatggtctgagaaaattctgaaaccatttcgtctgagatattttaccttttatttctttgatcactcggagcgattagcgaacctctcaaccttctcatcgttgagattgatccaaccatggcttctccaagcccacagctcacctccacaagcatctcagggtcactgtaatgagtcacagcctgaacaatggcacgtgcacgacgagctgggtcacgctcttgaagataccagaaccacaaagacaccatcacatcaagctgcacatgagagctgatcagcggagta

SEQ ID NO: 50012 - DNA, 1599 bp, Arabidopsis thaliana
aatcagatataagcttttaagtaatttcagatcttaattaacacattgaatatttaatgatatggatctaatataagtttatggtacaaatgaagtaaaatagtcaacgttttccaagtaacatgtcaaccgtacatacattaatgtattttacatcaaaaagtccatgcaatgattttagaattcaaataaataaagtctatttgaattaggaaaattatatatatttgacacaaaattaaaatttattagtttaataaaaagaataatggtcataacgtatatatacaaattatacaactttacaaacaagaaaacaaacgaaaatagtcaacccaccatgcaaacgctaccgtttctaaattggttttaattataaatcatcggcgatctacgctaccggtaacaagatatccaattccgtggcgtctcgccggaaaaaccataaacaaaaggctacacataaccccaacacccaccggaacaatgtccaagacatgtttcgtctctgcctccggcgacggataaaagcaatcagttatatacttgtctctcaacgcaaccgctccaaacactaaaaccgacaacgtagcgtggatccaatcaacgaaccgcatccgatatttggctaaatcgggtaaacctaacccggacgggtcaggatagtcaacgacccacatgcctttgaacgttacgaaaccgaagtagatagttccatcgtcggctttaacgctatcggtaaaggagctgacgaagcaagacgcggctaagaggaaaaggagaacggcggttaggaaacgcgttgcgtggtcgcaaacgccgtttgaagtgaaaaccggcgttaggagttgaaacgcgaggagtgttcccgttgggagtaggtttgagagattggctgctgacgtcagggtgtttgacatggctcgctgagacattgacatctgtctcttgagcacccgggattctgacggtgtctgatcggataactcgtcgagtccggagcggagtgtttgcgtttcttagccgaaggcagacatctttttagttttgattcttttcaggtttcgatcgttggattgatattggtgaagataatgatgatgatgtttttttatagatgctacgatatagaaacagctaatgataacttagtttacgcatagtggactgtctgtatttaagtaatctctctgttcagttaacttgtacgataaacaacattatacacgacaaataatacaagactttttaaagcttttaacaagatagaacataatgctgaaaacagtgattgagctagatataactgtgtcatattctgcttgttcttcgcacgctagtccttctctgttctcacgatttagggtttctttcccaatgctctgttttgttcattttctttctttggataaattgcatacaaaccctcaaagtttccagtcttttgcaaagttgtagttatttttatattaaatatcataaacaactgattgccaaaacgtcgtcgctcttgcaaaagtccacagatactagtagtaagtaaagtataggaaaagtggaccaaagaaacaaaacccatacaaaaaaagtcgaatccga

SEQ ID NO: 50013 - DNA, 629 bp, Arabidopsis thaliana columbia
aagacatattctttagggacgtgaggaatggagtgacttgtttcctcctttcaagacccgacaaccaccggagctccaacttgagatataggccatctcttaagcccatttcttttcacacaagcttgacaaaaattgtggggagatgattctgatgaacgaaaaggggcacatcatggactgtagacttgacacgaaagaaatcatgtgcacctacatacatcaaatgaggatggagaagttgattgctcgagtaattgctcgatacacttaactgctaggtagtatatgcgaggtcgatccacaaggaccaaagatactctaaggatttctgagactcgtttttagctaaagcgaaaaggttgtttgtttggttttcggattgtaaattaaaatgcaaaaaaataatcgattaaacttttgtgataaaaagcattggacctatttcagagatcaatgattaatagagataagaaacaagaaattcagcataaagaaccgttctcgaacatgaacacaagtttagactaattctctctcgagacattaatcactaaatttgactacttaactacttaacttttgtttgtaattttctagtcaaattcgcattagaattaggttcacaa

SEQ ID NO: 50014 - DNA, 828 bp, Arabidopsis thaliana
cggtcctaaacgggccgaccgccgcggccggagtatcattaaagagttctcttaataaggtcttaaaagagtcctgaatcagcagaacagcaataagaaaggactataaatatttaccgtgaaagggtcgtcgacgatcaagactggtccgacttgaaacgaacattctgatgtcctgcaacattgtttaaacaaagtaaatataagatctaatacttttaacttacgttaattacaaagtatttagtaccattttctcagttcttggtagaccaagctctttagtgtttctttggatgtttcaggatctactctttgtgcttcctctttgtttgggataatgatagctccaaggcgacgtcggtcctgttaacgagaaatcaattttgaataacaacaaataagcaaaatagccgatactaagatttttcatttttgtaattgtcttgagagaatttaagcacctgtccaataacaacaatttgttcaatcaccctgcttctcatggcggcttcttcaatctccaacggttccacattttcacctatagtgatgatgttatcgatataagaaccgagttcttttatttaatcgattttgggttcgattatgcatttgaacatgtttgtaaataggataatacctgtggaaagtacaattgtgtcttttgcacggccttcaagaactatgacacctccacagtggcgactccgctcttttgagtgatgatgagcaatccacctggtgtctcctgtattgaaccatccactcgcattttagacttgctttgtagtcgatggattctgcagcacactacaacagaaagat

SEQ ID NO: 50015 - DNA, 864 bp, Arabidopsis thaliana columbia
taactaagaacacaaacccagaaattactgaaatcatatcaaaatatagatctaaacaagctaaacaactttactcaaagaactaaatgcaaaaacaaaatagattaagagtaattaaggtttcaagattcagaaacacaaagaaaaactaagagataaaagcttgatcctttggacaaaccccaaagaacctatttctactaaaatctcaaaaaccctagattcactagaagataagagacttgaggcggtttggatggatgctcgatcttggggatcgagtaaagagggtgttgcaaagtctgcgcctttgcctccatgctctgagtgatcaattggtcgagtagttgcttcttcctctcctatctgtatgctcagatgtctggttgagtggggaatgaggaggatcagaagacgctttgaacgatcaacaagtcttgtagagtatgttgcccttgatcaagtaaactggtcgagtagaggatcgagtaaggggtcgagtagagtatgttgcctcgtctatagctacctggatcgagtaaaggggtcgagtgaattgctctgctgcttccctcttggtttgatagagtagagggtcgagtagatttccttgtgagctccttctgcacctgaaaacacaccaaaacatgcaatatatatgtaagatgatcctaaatgcctaagtgtgcaaaataagctaaatgtgatgcaaaatgatatgatacaatgagtgatcactaagctaaatgatgataaatacatgcctaaaatgagtaaaatacagtgttatcatcaactatagagacaactcgacatgctccacacacaacgcatgggacggcttcacgtgctcaaaatacttcg

SEQ ID NO: 50016 - DNA, 860 bp, Arabidopsis thaliana columbia
cagcagaggtgtacctggatcaagaagacaacaagaaaaacacacagttagcaaccaaattgaaaattgaaaaagaacttgatctaagcaagtctgaaatcttaaaagtaacaaacaaacacccaatcggcaacggcgccaaattgataataggtttttaagatcaataaatcctaaaacactatcatgtcgttgtagtactaaaggttgtcaatccaaatgtgggtgatgctaacaatcaagatgtgatcaaaagtcactaagtcaagccaagcaataacaggttttggtgtgttctagcagtcctaagtgaacatgcagaacacagaaattcaaacagaaacagtaaaacacgcgaccaacatagctctttgcagagcactgagtgaggtcgagtgacaggtcgagtaacaaacacaaagtataacatagatactcgactgtacagtttgttgccagacaactgggtggttgagtatgaggtcgagtaacaagatataattgcagaaattaagcatcagatgataagatgcagtaaacaacagtagactaaacaaagaattcaatcagataaagaattcccgaggatggggtaattgagtagttttgtttccttagtttataggtgattgacatgcttaataaattatctctagacaacaagttcattaaccaaatctaagtgccaccgcaacagagaccctcaagttaacctagtcccagactcaatcaccattgacgagagctaacctaacaggcattacgaatcaacaagttaaagccaaaacgctctctgcaaccgattccttggtacagggccacgaatctctagaattagtggttcagacatttcatcgaac

SEQ ID NO: 50017 - DNA, 726 bp, Arabidopsis thaliana
catcttccaacactttttaagctcccacaagaattcaaaaaactttcctatgtctacattacaaccacgttgctactttggaaccccatcaccctaattcctctctttcgtcttcttcttccctcgtctctctctctccgcaactcctcgttgcatcactttacattgaaacataatctgtagatattaaacaaagtcttttgcaagattctgattctctagacaaatatgcagtttcttcgacttcttacacttcttgtttcttcctacttcttcttcttcatcaacttctcctcctcactgaatccagatgggttgtctctacttgctctcaaatccgcaatcttacgagacccgacacgtgtaatgacttcctggtctgagtccgacccgactccatgtcactggcctggaatcatctgcacacatggccgagtcacctcactcgttctctccggaagaagactctcaggttacataccctctaaactcggtctactcgactcactcataaaactcgaccttgctcgtaacaatgtctcaaaaccagtgccgactcgtctcttcaacgccgttaatctccgttacattgatctctctcacaactcaatctccggcccaattccggcccaaatccaatccctcaagaatctcactcacattgatttctcctccaatctactcaacagttcactccctcagtcactcactcaactcggaagctta

SEQ ID NO: 50018 - DNA, 626 bp, Arabidopsis thaliana columbia
gtacttcaaagtcaaagatctgtacaatacatctatatttaacacgactttttgacaattgacaatttttttccatttagagtacccaaaaaacatgacacgtattgcgccagggacgcaatgtttcaagaccccatcaggcgcttgtaccacagccggcccagacaagatcgccgactgtaaattcctctggtttgtacacgcccttacgcgaggcgtcggactttttcggcataccaaagttagcatcccagtaatcgcaatctacttcgctgctgtcttcgttatccttacgtggaaacagcttcgggtctttgcttcaatgcaatttcgagcttccccagatacatgtctccgtcgactcttccttgcgactcttcaaggatttccatgtaccaacaatggagtccctgaaccttgaaggaaccgctcgaactctgccacgcgaagacttggactggtcagagcacacttgttgagattcttctctactggtcaaggagcttgagctacttgttagaactccgggttctctgctacatggttgatcaacgcttgctcgttgtctcttcttatacaccataatctcacccttttggctaccatactcaatttctaaatcaatt

SEQ ID NO: 50019 - DNA, 509 bp, Arabidopsis thaliana columbia
gttttgggttttttaaatatcctatcagaaagcttaccaactttcttttatcttatttttgttcttgttgttcttaaaggagttgtgctaagacccggtttcatatacgggaaacgaaaagtgaacggaatcgaggtcccgcttgatctagtcggggagccactagacaagatctatgattcagcagagaggttcattagaccattgaggtctctccctgcatctgatctcatcttggctccaccggttaacgtcgatgatttagcacttgctgtgatcaacgctgttaaagatgacgacttctttggcattttcactattgagcagatcaaagaagcagctgcaaaaatgagagcgtgaagagtctttagatagataccaaggagtggttattggtttgtataattgtatgcgaaaagtattaataattacatgaatagctctccctttgtcaaattgtaatgtatatcatttgtagacgtatatattatttacttctacgacgagag

SEQ ID NO: 50020 - DNA, 721 bp, Arabidopsis thaliana
tgactcaaaaaataaaataagagtaagaataagacaaaaaaaaaaacgtagatagtaacaacctccccaagacttaaaagtcactatcctcagtggcatttaaatctatagtaagcgagaaaaataaaagaaaaatgaaaaaaaaaagaaaaaaaaaaagaaaatcatactagtgggttgcctcccactaagcgtttttttatagtcaatagcttaacttggcggagttcaggccttggatggataaacatgggacttatgctgcaatctcgccttccaaggcggagtgtaaacagatctgctatgtgcaacatctggtgtcgatcgacactgttggtggtgtcgatcgatactaactctgttacttgcaaaatcagtagaggaaacaagctcccgagaaactcgatgttcgtttaccggtgaagcacacttcaaagattttgaagaagtaatagaaggataagtaagagaagagatggaggagtagctatcatagggaactgaaatagatgtgggctaggaaggaggtgcagaaccatctgtctgtgaagcacgatagtgtcgatagacagggggtgtggtgtcgatcgacactgattctctgcagctctcatctgcccgtgaattaacgttgccataattttcctgcaaacttgtgtcaaccaagtagatactttcttcgagcagaaaatcattgataggaacgtcatcttcaaccttg

SEQ ID NO: 50021 - DNA, 514 bp, Arabidopsis thaliana
tctagtacagtgtgctctaaagagtatgcaaccggtgtatgaagaatataaacagtcggtgcatttccagaacgcctccggctgcgagctgaatgccatgactgtcatatcccgccggatattccaggcatggtgaagcgcaaactggaagcgagcaatgatatctaccagacctttattgctcactccattgatacacctgaaaaattcgaagccaaacgcgcggaacttgccgagcgtgaatgggcgcgaatgaaagaaaacaactcggcaacctgccgctcctgccataactacgatgcgatggatcatgcgacgagcatcctgaagcagcacgtcagatgaaggtggcagcgaaagataatcaatcctgcatcgactgtcataaaggtattgccaccagttaccggatatgagtagcggcttccgtaagcagttcgatgagctgcgcgccagtgctaatgacagtggtgacacgctgtactctattgatattaaggaatttatgcggcga

SEQ ID NO: 50022 - DNA, 485 bp, Arabidopsis thaliana columbia
tatatatatatatatatatatatatgtatatacattttagatatgtgtaataataatttatgtagaagcacgatatgaaaaaatgaaattcattctatgaaaatcttcaaatatttaattgtaaataaaaaataaaataaaaaaataaataataataataatcccaataataataataagtaaaatatctgcaaatctattaaaaataaaattatgagaaaataattttcatacatatttagaggttgtgtagttaggttagccgggtttcggttttaaattgtggtcaaccggggatgggattctagctgaaagtgtaaaattggtgcctctcaaacatttagagaaggatattttaataattgacgcatgttttcaagatttatgcacttctcattagattctaactttttcatgacttttagttttctattttcaattcagtttaaatttgctcgtttgtttctaagaatgatgtttttttg

SEQ ID NO: 50023 - DNA, 728 bp, Arabidopsis thaliana
  unsure (1)..(728): unsure at all n locations
tctcataagcctgttgctctctctctggtctagttgaccaagattcagcttcatcgacgtttaatccgcatccatggaggatttgccactgtagttactcatattgattccctgaaaaagaatgtaactcaaaaccaaatatcaatatgttagttcaaataaacacacacactaaaccagtcaagtacgcggtcgagtgaaacggtcgagtacagtgatattgtggcttcgggtatagcggtcgactgtacacgaatgaaagacgtaacagtgtggtcgagtaaatggcgaatttagagaagacggtggcggtttgaggagcagtcgagtaaagacacgaatggaggcgcagtgaatggcgaggtcgagtgaatggtggatagttgagagatggtgaagccggtccggtggtcgagtaaacggagatgacggaagcacggacaatggcgagaaactccggcgaagatgttgaggcgaagtgtgaagtggtcgagtgaaacgagagacggtgagagagtatgcgaagctggaacggcgagaagctccggcgaagtcgagtaaatgaagatgaagatgaagcacggagaggtcaagttgcggtcgagtggtaaggaggcgacggtgaggcggtgaagcttccggcgaagtgaagggcggacggtcgagtaacgtcgagtggtgagaagganaaatggcgaaatcgagtacgtcgtcgagtgaaggagaga

SEQ ID NO: 50024 - DNA, 816 bp, Arabidopsis thaliana columbia
gattctccttcgatcaggacctcaatacacgagtaattaaagcttctgcaaagcttcagctctaaccgagctcgtttgcgccatcaaacaataaaactcgttacgatttactcaatataattctgtctcagaaacatatgcataagtcagtaaccaaccgttagaaatgtaatcccaccgttgaatatgtagttagttgtaccatgaataactccacaaatttacagcatgatcggacttcattacaagctccaaacgttgtcttcaacaagccatctcgaactgtcatttagggtttcctagatttgacagacttttcagttacttgtcatgaaagaaacgtgcataatttcttgaatataaactcgattccaactttgtcagcggctatagattcttgatatcgtgatcttaacatatacaccttactcgtgatctgattccttcctttctttgcccaatctctgattttactaagaactgcttcatctcacttctccttaatgacatgaaccagatctctatctctccattttcctccattgcggtggtgacgatccgttctcatccaaagcatcccgccttctccactactccgtttacttctcttcgatcatctgtctctttctcatcaggccaaattcactctatcttaaatcaagttctctttctctgattgtgtttaatctctctctctctcatctctcgatgaagacaacacgtcaacatgacacaacagtgtcacaattagtctcggcttcctccaccaccacccatgagctctttcccttttctttgatccaataaataaaactc

SEQ ID NO: 50025 - DNA, 737 bp, Arabidopsis thaliana
gtcagaatatgcaacatccaattgaactaaccaaacttgatatctttgatgctatagaaacttgtataggctgatcagagtcgaggccaggtttcgatataacagctcctttggagtccaaaccaagtttcctctcaggttcttgcggcttcaatctaggcaaagagagtctcgggttgagatagggtgcaatgtcacttgtgatagaaatgataccaacaacagtgccgttatcatcataaaagggagaacacgtagtgacagctgaaaagatctttcctgatttggtcttgacaggaaactcccctgtccagctttctccattggcacaacgtcgagcaacattcaaggcaaaggcagcattctgatcatctacaataacatgtactgggttccgcccaactacttctgcagcagagtacccataaagcttttccgacatggcattcctgagaacaatcatgtcaccataatcataacgattgactatacaattccaaaaaaaaaaaaaagaagtactaaccaaaagataattcgcgtattgagatctaagacatgaacagactgagccaacgactgcaaaatattcaaatactgtttatcagtgaacttcccgggcgatggattcgaattcatcgatccctggatacgtctcaacggccgacgcggcaacaccggatgcgacggctgcctaagctccgtggagagcttgagcctagacatctcctgctttagaa

SEQ ID NO: 50026 - DNA, 546 bp, Arabidopsis thaliana columbia
tagctcgtagatgggaggatcggctcactaagtatttatgataatacttacgcatctcattgtgttgttgatgcaagtaaagataaagtgtgatccttgaatcatggcaaggaagagaggatgatctaggaactcgtttgttttatttttggtgtttttggttattggacccggttaggattgttagttattcttggttttgttggtcgaattatttattgattcataaaatattatttttgacttgcggtttaattgttattttattggttggtttaattagatatttattggaatatttaattatattttaaaaaaaagggttgggttgtttcagcagaccatgatccaaacaacatctacttcgaaggtcgatatagaccctttttcgaaaggtgtctggaggctggttacctgattgttatttaccatgaaggactgcatctagacactattttacttttacaccgaaatgtatcaaggcacgtcgatgcaaccctggcctgtgcagttctttgcatatatgacggtaatactcatatgggt

SEQ ID NO: 50027 - DNA, 941 bp, Arabidopsis thaliana columbia
ttttctccaaagaatctaatacagaatctacccaaaaagaaataaaagaaaattatgattttgagtgtctaatggaaaaagaaacaacaaaataaagaaaaattaactggaaattgaattatctaaaaaaagaaaaatcaagcaaagaagaagaagagaatcaaaaagaagtaaaaatgaaaagaaaagaaacgtacaaggagaaaaaaggtttccattattgttgactgcttgagaaaaaaaggttaaacgtttctctcgcgtcatttcaattccattttctctacttttgttcttctgttagggagcgagagattagatagtcaaaatcaaatcgacatggattaagcacttagcagcttcttcaaggtccgattcatctcgaaacggtccccgattctactcgatcggaggagtagttgttgttgtggtagggtttacccattttggagcgcaatggagaatccacctgcggaggagctgctgaagaagatacttgagctagaggagagtcaggagcatctcaagcaggagatgtctaggcttaaggtatctacggagcttagacagcgatcgcattcggtgtctcctcatcgtccggcgaggagaaacatcggagagggagctccgtcttggaggaaaagcggtgccgcctcgtttcgtaacgcgtcgccgttgcggaaggagagccgtatccagaattcgatgagattgaggtctgaagttggtggcgggggaccatctgctgggaaattcactgataaacagtatttgaatattttgcagtcgatggcacaagctgttcatgccttcgatcttaatatgcggattatcttttggttagtagtccatcttgtgaatgcagtttatgctagattctaattagggagtaagatgtgatgtcattgatttgcattctagttttgcattttttcaatttg

SEQ ID NO: 50028 - DNA, 587 bp, Arabidopsis thaliana columbia
tagcagttccatagatttgttcttattacaatcacactgtgttgtgataaattatgtttgattcaaccttgtttagagcttggtatttaaacacagacaattgagtttgattttttttgtcttaactacttgtaggagagtcaggagcttgcagaaagagtgatgatcacgcgtcttcacttgtatggcaaatggatcaaggtaaaatcgcttgctatatctcgctccagttttggtttatgtgtttttcccttcctgccatgggaaccagaaaagactcaaaagttaatattgtatagtttgttgtgtagaaatgcgaccatgggaagatataccaggaaatatcggatgaaaacttggcgttgatgcgtgaacgcctgatggagaccgtgatatggccttccgatgacacaaactcaaggtaataggctgaagaagacagcgcacaccacagcacaacatttgctttgtcaatttgcttctcagtttttaggacttcgagttttttagtttgattacatattactatagtgaaagagcagtgtgtatatgatgtctattcttggcatgtactatatgatattagg

SEQ ID NO: 50029 - DNA, 1157 bp, Arabidopsis thaliana columbia
tgaaaaattaaagaaaaaagtaaggacaaactgagaaacctaaaaccagaaaaaaaggaatcaaaacaaagaaagataagcaaattagttttccttctttgttgactctctccagattctgtttcttcttccttaatccatctctcaagcttctccaccattttcaccttgattcagcttctccgattcaaactcagatttgatctccgttgatttgatttgactgcgtttttctggcaatggagaagacgactccaccagcggaggagcttctaaagaagatacgagagttagaagaaagccaagagcatctaaaacgagagatgtcgagacttaaagtatcggcggagatgaagcagcgttcgcattcagcatcgccgcaacgtcctgtgaggagaaacagtaacgacggaactccgatgtggagaaaaaccggtgcggcttcgtttcgtcacgcttctccgttgcgtaaggagagccatgcgaaagttgccggcggcggaggcgaggggcaatcggcaggcaagttcaccgataaacagtatttgaatattttgcagtctatggctcaagctgttcatgtcttcgatcttaatggccaaattatcttttggtgagtactagttagaacatttctgggattgtggattttgattcctatagtttcgttgtaatgtgtatgtctttgtagtagctgatatgtcccaactgatattcagattcaaaattccaggaactcaatggcggagaagctttatggattctcagcttcagaagcactggggaaggatccgattgatattcttgtagatgttcaggatgcttcggttgcacagaatatcactcggcgttgcagtagtggagagagttggactggtgagtttcctgtaaagaacaaagctggagagaggttttcagttgtgactacgatgtctccttcttatgatgatgatggttgtcttattgggatcatatgtatcacaaatgattcggcactctttcaagacccgagaggctctccggctaagacaaggagggggcaagaaggtgaaacgagctttagtcgggtgactagtagtgttgcatctaagcttggtcttgactcgaaagaggcggttgtacaagacttggccttgattctcagcagcctatacaag

SEQ ID NO: 50030 - DNA, 457 bp, Arabidopsis thaliana columbia
  unsure (1)..(457): unsure at all n locations
nnnnnnnnnnnnnnnnnnnnnctaaaggttttgcttacgtgccacatcactgcgccccatcaccgagataaagtaatccccgtcacgggttaaaacgcctttaaacatcggatcgtcattgagcaaagtacgcaatttacgcgcgatggcgatggtgacatttttctcccgcgtaccaccggggccgatagcgccagggtcctgaccgccgtgtccggcatcaatagcgatgataattttatcgccagtgttagccgtcgcgcgcgctgccggacgcgttaccgtattactgctgataacacccgtagtgcggttactttccgttttaaacggattgcgcgccggttcgctgacgcgcggtgcgacaaccgcaggcgtttcaacgcgtttcgcaaccacgggcggcggaggatgcggtggcggcacatcggcgttaatcgtaaagacgacagtgtaa

SEQ ID NO: 50031 - DNA, 567 bp, Arabidopsis thaliana columbia
cgtctagaaggaatgagaggaaagaatacccaccttctattttgtacaagtggtatccttctcagacggctgcttagtgatcgcaatttgaatggagttacacatgtttttgttgatgagattcatgaaaggggcatgaatgaaggtacatatctatatatctaatgtatgtttaggtttctgcaaatagagtctcataataatatgcccctcacttcttggttgcagatttcttaattatagtgttaaaggagcttcttccacggcgtccagatctgagattggttctcatgagtgccactttgaatgctgaactcttttctaattactatggaggggcactaccattcacattcctgtaagacaatgttcttcctcaatagtcttgacactctagatattcagcatgatttccgtgtttcgagttgtttctatgggaagccttgaatgtatatatattttcagggcttcacacatccagtgaaagcacattttttggaggatgtactggaatacgggatatagctgcctcttttaatcagtgatgattaggcaagaaagcgtgga

SEQ ID NO: 50032 - DNA, 194 bp, Arabidopsis thaliana
ccacgacgcaatggagaaagacggagagcgccaacggcgtccatctcgaaggagtcgccagcgataaccggagtagttgaaatggtaataagacgaccaatctgaccagcaaggaagccaagatgggaaaggtcatgcggcatacgctcggcgccagtttgaatattagacataatttatcctcaagtaagggg

SEQ ID NO: 50033 - DNA, 562 bp, Arabidopsis thaliana columbia
  unsure (1)..(562): unsure at all n locations
nnnnnnnnnnnnnnnnnnnnctaaagggcattcctgaacaaggaagagtaacaacgggcgggaccggaggggaataaatgatttctgaaaagtccggtagcggaacattaccgccaccgggagaatttgcatgttagccgccgaactggtcaggatcgggaccgagacgcttgccctgatcgagttttgcaatttcgccgagttcgtctttgtcgagacggaaatcccagacatcaaagttttcggcaatacgtgaaggtgtgaccgatttcgggatcaccaccaggccgctatccagatgccagcggataacaatctgcgccggggttttgccgtatttatctgccagatcgcgaatgactttctgatcgaaaacgcctttccctccttgcgctaatgggctccaggattcggtctggattttgtgtgtcgcgttccaggcgtgtagctggcgttgttgcatcagcggatgaagttcgatctggtttacacaggcgtcacgcagtttcacaatcaggcgttcaggtgatggattggaagttcacacgcgatgcttttgatt

SEQ ID NO: 50034 - DNA, 452 bp, Arabidopsis thaliana columbia
ggtattttgataagtagctaactgctgataacatactgaagttgtgtttcttccttgtgcagtaactgctctgaatgcaattaaaaacagtttcaagaacgcaccagctgactggagtggggatccttgtttacctaaaaattactcgtggtctggaatttcctgctctgaaggcccccgaattcgtgtagtcgctttgtgagttggaattttgccaaattgtgtcgccagttttttttaaatcatcagtttgagatttactgacactgttctaaaattgttgttccaggaacttaactaatatgggagtttcaggttcgctagcacctgcagttgctaaattaacagcattgtcctccatgtaagtactttgacctgtgaacatttagttttatgcttgtacgtcaaaaacatcaattgatatttgtgtgttatgaacagttggctgggaa

SEQ ID NO: 50035 - DNA, 385 bp, Arabidopsis thaliana
agattctggagaatcctttggggctttatccaagtgttttcttgtgaatctcccagtgttgaataaattgttccattggttgcaagtagatcgtaactgcttcagagatgtggcaggaacgcgacaaagtatctcctctaacaaatctcctggaaggtccgacaacatcaatgtgtttctcatctctatcaggtggctttgattgttaattagggttttattgtttgctccgacccgtgctctcacttttaatattatatatatatatataaatatatattttctagtcatcacataacttcttcctctttatacacggagttagtttattttccactttatgtgttttctagtatcctccgatatttgctcgtgttatatgata

SEQ ID NO: 50036 - DNA, 584 bp, Arabidopsis thaliana columbia
  unsure (1)..(584): unsure at all n locations
ataaccccttaggtgctctcttttaacaattttaattatagtctcggactcttcaaccggaataaaccggtctaaaacgtttttaatttcaattgtaccgaaaccctctgactcacaaaaagtgtttagtgctctttaaacaattttaatttttaaatcgtcttgggacttttaaaccggaataaatctttcgggtcaaaatttccgaaccctaactttagccccaaattagagagagatgcagaaacgggagcttgggaaatccggcggtaattccggtggatcttcgggtccaccagcgaagagaggccgtcccttcggtagtacaagtgctaactcagctgctgctgctgcagcggcggcacgagcggacgcgantgtcaccgtcagctttacttggtccttctcttctagttcacaattccttcgtcggtaagctcgcaatgaccactctataattcctctctgttttcttcttgtgaacgagtttttaatcggtaattttcattgggatcattggaatgtatagagcagaacaatagaagaatagttcttgcgttgcagagtggtttgaagagtgaggt

SEQ ID NO: 50037 - DNA, 554 bp, Arabidopsis thaliana columbia
gaggatcgatcccgtataggcattctaaacacaatgagagaacaatcattcctcaacgaaattgacttaagcaaactaaacaaaagactatacaagtatgaaaactcatacgtgtcagtcaagaaacaaaataccaaaagtgtaactgaagcatcatcttcactggtagtgaccggaatcacgaatcgagccatcatcgttgaagccaaagtcttcatcttcgtcgggaagatagccttgactgtcttcttgatcaaagaacaggtggtttaactcgtaagactcgtcgaaaaaagagctaggttcaacagaatcttgaggaagattgtcgttgtggccgtcgtgaccaggatcttgaggaagattgccgtcgtgaacagaaacttttgcaggaaccagaacaaaacagagactaccttgctccaaaccgtcaacaacagagtcggcgtggcacccgaaagattgacgccgtcgtgaacagggttcactcctccgcaacggaaaacccagagagagaaaacgtcgcccaccttgaacgttttgtcgttcttatc

SEQ ID NO: 50038 - DNA, 791 bp, Arabidopsis thaliana
ttgcttactttcaaccattgagcagactgatcatgaaccactttgggcttcaaggacatcattgcttataggcaaacagttcaaccacgcaggaagtacctaataaaaccaaaacaaggtaacttgtgaatcatcaaaaccaaccacatgtatgggtacgatggcgaaaccaaaataactattataatctacctgagaagaatcaatactatcacggtgaaattggcagatctttcccacggctgatacagcattatcatatgccatggcattttcagattgccgagcatttggcagctgtatcacaacatttaatcttgacagagcctctgttgacataaaatcatgtgttacttaactgtcaagtatggatcaaagcccaaaaacctaccagtgggcaaaggtatgtcatacctccaataagaggcttgaatacagagccgccaaactcagcacaaacgccaagcccataaacagcagcctgtcgaacctctgggctctcgtcattgcaagcttccagtacaaatggaagataggtatcataatatctgccaaacaaatataaggtgtcttatcagaactctaaaactggaaacctacaaatgtaaaatgatccagtggatgcgtatccttacttaaaggcagcttcacggcattgttctgctacatcatcaaaaatgcatatagcaatccttctctcttccgctgttttatctcttccctgaattcatcgaatacacataaggtgaacgaagactaatattgtaccagagacatggtaacagccacag

SEQ ID NO: 50039 - DNA, 608 bp, Arabidopsis thaliana
  unsure (1)..(608): unsure at all n locations
ttccctaacttcgttgtcctctccaacgacgtatatcatgttgtttttgccgtttattacaaaattttgctcatacacaaggactttgttctcctcatcgaccaagaattttatgccatatttaatctcaggcttcaaatccaccgttaaaaacttgatccacgacaacactttggcctcaccaatcttatttgtcacccatatctgtgtcttcgatgtaagggaaggttgtaataacacggaaagtttctcttctttaacaactgatagagatgtattacgaaaatacggaatctgatacggaagacatagacgttcaaatctttctgtcgtataatcaaaacagatcaagaataggtcgcacggtttatcatttccatctgtagcaaaccagtaagtcttacccttcaaagaaacgttttcaatgtacaaagaggagtccacagtgacatcaagaatcctccatgaatttgagttaatctcataaatttcgaactcttggccaccataaatcccgtggctcaatattttgtagctattattgtcggatttnttgtcttggtaggatcaagagcatagttgcagatgtagcccatcttctgtgttga

SEQ ID NO: 50040 - DNA, 472 bp, Arabidopsis thaliana columbia
ccatgtcaccatagaagttcttgaaactttcgagctcttcttgcactcgtttcaactcaatcctcgtctgcaatacttcggggtggttctcatacatgtccttcagaagctgcacaattatatgtaagaaaacatatctgcattgattcaataaacttctaaataatggtaacccaaaaatttaccttatgctcatgcatgagtgatgcaaattcttcatccagaaaatcatctttagataacacgccatccatgagactttcaaggcgaacaatcttgtcctcccttgtttgtcctatgatagcattgcactctctctcatgcttgtactgttgcacctgtttaattttccagagataattagaaaggtttcctttatatgtaaaaagtagagaagctgaccaacagaacataagcaagaatcataccagccgattaagctgtgatatttcagaggcttgcttagtgcaga

SEQ ID NO: 50041 - DNA, 472 bp, Arabidopsis thaliana columbia
gtttcggcgaagtttacaaggcattttctccccaactactcttaagttgtatttgtgttatgtttgaagatattgagatagtgggatgattagttagattcagttgtaatatgcagggtacgttatcaaatggaactgaagttgcagtcaagaggctgtcaagaacttcagatcaaggtgaattggagttcaagaacgaggtgcttcttgtagcaaaacttcagcaccggaatctcgttaggcttctcggttttgctctgcaaggagaagaaaagatactcgtctttgagtttgttcccaacaagagcctcgattatttcctcttcggtagtactagtagtctaattttcctcttgatccaatattcttgaaatcttaagcttggatttgcaaatggatgtgcagacccaacaaaaaaggcgcagctggactggacaagacggtacaacatcattggagggattacacgagg

SEQ ID NO: 50042 - DNA, 465 bp, Arabidopsis thaliana columbia
  unsure (1)..(465): unsure at all n locations
nnnnnnnnnnnnnnnnnnnnnnctaaagctattgtgtcgcgcttttgccttccggcatagttctgtttatgcttctgccagcgattatcaaaacaatgaatttcacggcaggagtgaggcaatggaaaagaaaatcggttttattggctgcggcaatatgggaaaagccattctcggcggtctgattgccagcggtcaggtgcttccagggcaaatctgggtatacaccccctccccggataaagtcgccgccctgcatgaccagttcggcatcaacgccgcagaatcggcgcaagaagtggcgcaaatcgccgacatcatttttgctgccgttaaacctggcatcatgattaaagtgcttagcgaaatcacctccagcctgaataaagactctctggtcgtttctattgctgcaggtgtcacgctcgaccagcttgcccgcgcgctgggccatgaccggaaaat

SEQ ID NO: 50043 - DNA, 825 bp, Arabidopsis thaliana
atgtaacaaatttcgtatgtctctttattccttgtaaatatgttttcttatttggttctctatgatgatttaggaggtgcttcaatatctgttacttacattgacactgaaagaatcattcctgggtaaggatggcttcttcacaagttattcaaaggaacaaactaatgcacacacataacgatgtcaacacattctcacaagtatctctttcattctgtgcaggtatggtggaggtatgagttctgccaaagctgcactagagagtgacacacgggtgagtttacaattctgtttcgtaaactcaaagatgtatcggttagaagtctcttagtccaaactgtgttttcaacataggtgcttgcatatgaagctggaaggaaatcaaacattagggtcaacaccatctctgcgggtaatccatctttccctcttacacgcctcgtggtacaaataacacgcctcgtcttttgaaattataaaagagtactactgtttgggtttcaggtcctttgggaagccgagcagcaaaagccattgggttcatagacaccatgattgagtattcctacaataatgggcctattcagaaaacactgaccgcaggttcatttccttcaaaccatcacctctcttgtgcttgttttttcttggaatcttacgctttataaatggcgatgatgtagatgaagttgggaatgcagcagccttcttggcatctccattggcctctgccataaccggtgcaaccatatatgtggacaatggtttgaatgcaatgggcgttcactggacagcccggtgttcaaagaccttacagcaaga

SEQ ID NO: 50044 - DNA, 911 bp, Arabidopsis thaliana columbia
tcacatatcgttaaaacattttgggtttgcttttagcgattgccatttgtcgagtgtctcaaaagattcttgtggcccgtataatgggctttagaatatcgttctataagcccatcaaattaatgaactgagtattatttccgggaaagaaataacgttttatgcaattacgacccaattaactttatagttttttaaaactgatggggaatgacccaattcaatgttttcaccctctcaattgcagccattagttaatactgtagtaatgtttagaaactagtttcaaaattttcgtagaaaaattcatgtaatatttttaaaaatcattcgatgtgctgcatgcgtatttcccaaaaattaaagttaatatgatttaagattttgttcacaattactgccaccagaaaaaggacggtgagattaatattttacaggtgaaaagatttttccaagacaaggtttaatttgaccatgcggaccaatttacttacaaggtgtcatggtttacaaaagcccgttaaatgagtaaatcctgatctgtttgccacgctggcaaaacctctcgcagaggccccaccaaatactataaatcattaaatctcgtttaaggcccaaaagatgatgcagagttgcgatcgtagagagtagagaacagggaaggacgagcggttatgttaatcatgacgtcatcctctacgattctcaccggagatatagatgaagaacaccgcacgtcgtcaatggcagaggaaggcacgcctacgcgttcacatggaaggcgctggagcactcctgttgattccgcgcggagaacctcttcaaagcttttacgtgtgcagattctagtgattaaatcagaccacgagaatcccgacgacgagtgcagggcacatagaggtgtgtgtgga

SEQ ID NO: 50045 - DNA, 468 bp, Arabidopsis thaliana
gttcatggttcaggcattggcagagaggtgaaatttgcttacattcggcattgtcccgttatcttccatttctttaagaatgtcgaagcacttatcaaattcatattttctcccatagcccccaatcaggatgttatatgtctccacgctaggagaaactcccttcagtttcattttgttaacctctttctcagcattctccatttcccccaattcacaaaatctcctaatcaaacaattatacgccaaatgatctggcttcatcccttgtttctccattgcttcaattttcatacgagcaccaaccagatcaccttttcgacagtatccatcaatcatagtgttataaataacctcgttcgggacaagccccttagccatctctctcccaaaatctcttccgctttctcgatctttccttctttgcacaacgcattcaacaaaatgctacaagtataagcattcatt

SEQ ID NO: 50046 - DNA, 421 bp, Arabidopsis thaliana columbia
tatttaattagtttaagacgaacattgtttaggaatagtgtgtataatgtattgttgataatgttgttagaaaaaaatactttaatactaagaataattacttattatataagtaaatgattagataattaaacctcatccccacatagaacgatacaaaaaatctgaaaataccgcagtgtaacgcaggtgattacctagtaaaataaaaagaggtcacaaaactttctgatgcacaaagaaactcaatgtcaagttctccacaacaaaaaacaaaaagtgaataaaaaccatgaaattaaagagtttgataaacataacacatcattggacacgaaaaaaaaactgaatgcagcaaagtttaaatgatcacattttttttatttggttccaagtctaaaagttcaaattatccatcatt

SEQ ID NO: 50047 - DNA, 450 bp, Arabidopsis thaliana
  unsure (1)..(450): unsure at all n locations
tagacatcatacatctctgaaatgttgcaggagcattacaaagaccgaaaggcattctccgataagcaaatgtaccataagggtaggtgaaagtcgttttctcctggtcatctggatgaatcgggatttgaaagaaccttaaatatcgatcaagaaagcaatagtacttatgatttactaacctctccaacatttgatcgataaatggtaaggggaaatggtctttcctcgtggcatcacatatggaagatcgtcttcaatcaaaattagtattctgcgttggaatcacagatggaagatcatcttcaactattagttgcatcagatgttcggtctcatctaacagcttagtatatgtagaagtttcatctaacagcttagtatatgtagaagtttcactgtccaaatctgcactatcttctatggaagagaccanaactagctctagtg

SEQ ID NO: 50048 - DNA, 564 bp, Arabidopsis thaliana
cccttttattgtaattacttttaggtagataattccttttccttagagatcagcccttgtataaaaatagaccttaaggtcacgtaatgaagaacacaattcgatcgatatgtttgaccctcttaacaaaccttttatccttttttttctttctttctactgcttatagaatttcttctgtttcttataaagcaggctctaaagaagattgctgatgttgtggtcgcgaaggatgggaccggaaagtacagcacagtgaatgcggccattgcagcggcacctcaacacagccaaaagagattcgtcatctatataaagacaggcatttatgatgaaatcgtcgtcattgagaatacgaaacccaatttaactcttataggtgatggtcaagatttaaccatcatcacaggcaatttaagcgctagcaatgttagaagaacgtacaacaccgcaactgttggtaagaatttgtattctcttcttgaatagtttatagttttctcttctttataccaaactataacattcttaaagacattactaattattctaaaaatatgtttg

SEQ ID NO: 50049 - DNA, 735 bp, Arabidopsis thaliana
cgcgtctctcgccaaagtatggagaattgagctatgagaacagtttttggtcctagaattgttggagtaagcttgaagataatgacttaagttataagttatttaaatataggaatagattaaatcttaaggagatatcttaggagttaagttaggagttatctaaccctaatcctattgttatttggttttaaatctctatatatatgagtcccaaagttgtggtgaaccatatgagttttagagagattaagactttgaaattgtttaggtttgagttatttcctaagcttaataagagagtaattcttatatatctttgagttcttaatcttctttgaaactagatttggtatcagagcatccaggttttcgatcaaagcaaaggattgaaaacatgagtgagattattgcagtaaacaacaaatcaaaagatggaggaggatcatcgtctattcaatgtccgatgttgaataacacaaactatacggtatggtgtatgaggatggaggctgcactacgagtgcataaagtctggggaacaatcgatcctggattagaggacgaagagaaaaacgtactagccgagcccttctcttccaatctattccggagtcacttattcttcaagtcggaaaactgaagacttcaaaggcagtatgggataagattcaatctaggaatcttggagcagaacgagtcaaagaagcaaagctaaaaactcttatggcagag

SEQ ID NO: 50050 - DNA, 591 bp, Arabidopsis thaliana columbia
ttcatcgttttctcattcaacttaaccaaaatgtgaaagatctatcaataatctacagatttctaccttaaaactgaagttttggacaacttttttcctcaccgatttgttttctgttttgtcaaaaacaccgaccaataaaaatgtctttacatcaccagcatttctaataccgaattctaaaattccatataagaaaattccaaaaaaattccaactctatgctacatagataacaaaaacttcaaaattcaacagatctgattccggcaagatacaccagaactaatgtgaaagtctctaactttcatggccgattatttttcttagattgactgcaaagtcaacaatcacatattcactgaataatgacttcctgtagattagtggcatgagttgtaattaataaagttgatttggggtattattgattttgtatttggtagggacaaagagcagtgactaaaaatctaattatgaatagtatactgcctagttctataattatgttcaaaaagtgactaattacaacttaatcctaaaataaattagaattatcatatatagaggatataacagttgtgcttgtga

SEQ ID NO: 50051 - DNA, 618 bp, Arabidopsis thaliana
ctgatgcgggtattctagccgtctgttttggtctttaccgttacgctgctgcacaagggatggcctcgatgatctgcctctacggagtaccgcttctgatagtgaatgcgttcctcgtcttgatcacttacttgcagcacactcatccctcgttgcctcactacgattcatcagagtgggactggctcaggggagctttggctaccgtagacagagactacggaatcttgaacaaggtgttccacaacattacagacacacacgtggctcatcacctgttctcgacaatgccgcattataacgcaatggaagctacaaaggcgataaagccaattctgggagactattaccagttcgatggaacaccgtggtatgtagcgatgtatagggaggcaaaggagtgtatctatgtagaaccggacagggaaggtgacaagaaaggtgtgtactggtacaacaataagttatgaggatgatggtgaagaaattgtcgacctttctcttgtctgtttgtcttttgttaaagaagctatgcttcgttttaataatcttattgtccattttgttgtgttatgacattttggctgctcattatgttatgtgggaagttagtgttca

SEQ ID NO: 50052 - DNA, 707 bp, Arabidopsis thaliana columbia
ggtgtaataaaagacaagagggtaccatatgcaagaagctagatagagtattacttggtgtaattgaaggacgtttttcagaagctggtgtctatcgacaccacacctgtgtcgatcgacactttaatcgttcccaagggaattctcgttttttaccaagtctttgagaagttttgaagttttccttattttacaaagtagtccctgcacgtttttagggacgaatatacctaattgtttggtcattgttagacctagtttttgttcttgagcttttgttacacatttgagagaagaatccaatcccttgagaggggattctgaactcctttgctattattgttaattcatcaatgaaaactattcagattatgatttgtgtttctattgtcatgtctgagtaatcaccttgttgggtctagagaatctcaatagggatttagatgtattagtagatcgaaaaccccttaggattattcttagagttcttcatcttgataattcttaatgctagttttagattgatcacctagaacttgatattggataatgggtattcccgctatatgtatttgttatttgaaccatcatagatgagcctaggcatttaagaaagaacatgtaggctcatagaagggctttggtttagatactaggtgaactaatcaagcttattaacaatgcatgctttagcataggatttctcg

SEQ ID NO: 50053 - DNA, 744 bp, Arabidopsis thaliana
taaggaattacttgctgattttaatatgatgcatacctctccggtattatgtgctactgtagagatgttctaacatgcagaggaactgtatacacacaaaagttttagcttgttccagaaacaatacatagttatcggtgattatgttgccaacaaggttagtaagtctgagatgatatataaatataaagtatcttatcgtggtgtagcacgtgagcatttggtcaattatgatgttgcaaacgagacaatatgttgtagttgcatgaagtttagttttgctgggattttatgtcgtcattgttggggtcagattcccccacaagcaagaccgagccaaacagtctaagaattacaatcacctcatggttaaacatatgattggcccctagcctagaacaaaacacctcgggaccttattcgatcaaccgtctcagagagagttcaaaaaatggctcgggtgttaatcctatgaacacagcccgagccaatcgtgagaacgctgcggaaaacatctatatcgcctcgggagacagccaactgagtttaatggacagtcatcaagcgcgccccaagccggtacatactgtttgcccgaagccacctctcaaacaccaccgagccgtgagaaacacccgaggcaaagtcttgtaaaaatcattcattctcaaaggatcattttcggtaaaataggatcttttatgggactttcggaaatgataaaggagaatctttgaaaataat

SEQ ID NO: 50054 - DNA, 873 bp, Arabidopsis thaliana columbia
ttttgtttaaaatattttacttaattaaaattttatcattaatctttctgtcatttactttttgagtattattgatttttataaatcatatcaaaaaagttcaaaatatttttaatctaaaaaaaacaaagtataagaaaaattttaatgcctaaaacttatgaatacttaaactttttcacatttatttaactactttaactatcttagaattacatacaaacttattaaatagtacacatgcttgacgacattaaaatatattctcctactaaatatacaacaatcacccaaaataataaaacacaggttgaatcctagtcattatttagaatgatcatctcttgtgtccccattgtgggacaactaatctgcaaaaccactttagagtcttcatatcccctttgagttaatgatttgtgttaagacgaatttatccctgtaatttattttgaatgaataattagaataattaatagaaaacattttgaaaaaaaaaaaaacggaaaaagaaaaaaaaaaagctcgagcacgagctcgacttcttcttcgggattcttcctccggcgagctccggcaagctccggcgagccgcattgtcgtttttctcctcctgcaagctgcatcaatctactaagtccaggtatgaagagagcttcaaaagctttgaattacatattttgaggattttgagattcaatccaattagatttgggtaattgtgttttagcacctatattagaagtttaagtatagatttaggcttcatttggtctgttaatgggtaagcaattgatttcacatgcatgattcatactaaattgaactcaaatcgaatatttgttcttgtcgcgaaaataatactggtcgaac

SEQ ID NO: 50055 - DNA, 918 bp, Arabidopsis thaliana
tgccagattgagagacagcaacatcacttacttgtgccattgctgctgagtaaagaacagcaacagcatgtctggaaaataagccaccgagggagtgggctaaaaacgaaatcttctttaagctcttgctcttttggacaacttgtctaacctattcctctctcacatccagaatgggaacagaaatcagctcatgtactgaagttaagggctagaaaaccaagacctacctatacacgaggtgcaaatgaagatattaaaactcacctcttctgctagtcgttttccagctccatcgatcccgccaaatgttttagtgaaggtattggaagaacttgctgtgaatgttcaggagaaacagagtaaattaccacacatcacgtgtgatccattccacgcatagcataacagcacatgagtattatcataccatacaaaactaaagaagagttgtggttccagacgaaaagatcttaaatttttcaagaaaatgtatatttcgcctcttgccgctaaagattatataagaccttgaagtgttttcaattttgtgcccagcacatgcattcaacttacgttaccatttcattcccaaaaattctcttctattatacatacaatccaacaactactcaactaaactaatagatgataacaatttagaacaagatgagcataccataaatcaagaatcttcttccaaggcgtcttttcagctcagcttctacgtagagccagtcgctgggactgcaagtaattgtgtcttagtaaatttggagtctataaattattcaatctgaaaacaaagtagcagaaatgatagacataactttctttcttttttttgacaatgatagacataactttcaaattcaaatacttgcaagtttctatccaacctaaaacaaaaccatgagg

SEQ ID NO: 50056 - DNA, 541 bp, Arabidopsis thaliana
gccgcctctcttcttcttctccgccgcgtctcttattctccagcagccgccgcaactcttcttctccagcttcagccgcaagtcgatctgtttcttctccaaggtaatgtcttcttctccgatataacttcttctttccattccaacttccaccgtccgatctaacttcttcttctccgtcgcgtctcgtcttctccagcagccgtcgcgactcttcttctctagcagccgtcgcgactcttcttctccagcagcagccgcaactcgatctcttttgcctccaaggtaacgtcttcttctccaatctaactgcttctctccgatctaacttcttcttcatctccgatctgacattgttttccagatctaatctgttctagtttacggatctaaactctgggttttgtttgttttgcaagatgccgtcgtcagagaatacttatgcacgatataggtcacagcagcgagacccgttgcatgtcaattctcctgttagtgctgggaatatttcaggggttcaaggttcacgccatccaccatc

SEQ ID NO: 50057 - DNA, 490 bp, Arabidopsis thaliana
agagaacatgattaattgttttttttttatggtttgtagcaaggaccaaggaagttactctctcggagacggaactcgagctgttaacccttctccgacgtggtcagactaactagtccacttttagcagagatcgcatcgtagctgctcttgccgtagatccagcagttcccgtagctccagcagttcccgcaatcgtccctccagcagcatagctagatccgatcgaagaggtcctgcagatttaaccagtccccgaggctaatctgcctataggtacgagttccgttatattttttttttaaaatgtacgagttatcgagacagctgcgcaactcgagctgctaactaacaaatgtcgtgctttgtttgttcagttcctcctaactccagctctacttcagaactctcgctcattagaagaatgaggcgtccaagccttcgtgttcaacgagccaacgccggggctcctgcttgtgctggtgatctt

SEQ ID NO: 50058 - DNA, 450 bp, Arabidopsis thaliana columbia
gggaacccccttgcattaactcttacacttccagtaggtgaatccgcaatgtgaacaatataaattagtcctattcaatggagcgagcggggaaccaaagaaagaataatcacgattgtaaaagatatactaaacagattgaagatattatcatagtgttcagaaggttgtttaggtgaattttgatgctcgtttgaacatatttgattacagatatactacatcttgctcttttccacaattttgtgatgtaatgaatttactttgtttagacatgattagcttcctcaaaatgtgttttttttgagggaaacttttgtaatataacactaatttgtttttaatcatgtctagattggcttattttttgtagtataagatgaaccatgttttgttaaactagttaagagaaactcatgtaatcgagtctctcgttggtaattcacatgt

SEQ ID NO: 50059 - DNA, 873 bp, Arabidopsis thaliana columbia
gaagtctaaaacgactctcagcagaactttttacttctttatcacattacaacaataaagaaatgttaagggaaatgtatgagcgtaaccaaccttgtaccaaactccttcaagaccagttttccatgtcgcggtcacaacatccctacgagaacccatgatcccaagatatgcacccaaacccacagaagtatttgaaccaaaagctgcatctctttcagacatcctgcgttttcttggccaaagactatggactctgttgtatccatcacatattccggaaaagtttgtatcaggcagatctaaggaattactcagcttggaaacatcgtctgtcaagatcatatcctcaggctctgacccgggaccaccaaataaatttcttctatgccattcttcggaaggcggatgaagctctaactcccgaagtagaagaccagcagcatcagctcctcttgggcgaggcatgttctgttaattcagtttttacaacaaattatcttatgagaatatagatcacaagatattatttcataatgtacttgaccaaatatcactaacaagaacaattgaaaaaatagtttcactactttactataaacacagattacctgcatatgtggtccaagagccgcttctaccacctcgggtaacacagtgtaatttccatcaatataatgcagtcgaacttgaatgtttccactacctacctgagagccaggtaagggatgcgcaagaccagatgttcgcttgcagagatccattagtatatggaaaagaactctcacctggaagatcagaaagtatccagtcattataagaaattttctagattattgtaccatcaaagatggcattgctttcttcgtttca

SEQ ID NO: 50060 - DNA, 586 bp, Arabidopsis thaliana columbia
tcggagtttcttgctagatttagtcatacagactcgatattactgacttgtatacactttcgaattttctctttcaaaagtagttcataaagatctaatctttatgttaaggaaaaatctaactgtgttttggtttttatcttccttctgtacagacccacaacatttatgagacattgagcacatttgagaatcttaatgaagaagaagagttcttgataaagattctatatttgttcttgagtttaagttctcgagggaatggcaagaggtagaataaggtcaaagctgagacttagccatatatacacatttggatgtcttaggccaagtgcagatgaaggtcaagatcctcacccaatccaaggtccaggatttagcaggactgtgtactgtaaccagcctcatatgcacaagaagaagcctttgaaataccgttctaactatgtttctaccactaggtacaatttgatcaccttctttccaaagtgcctctacgaacagtttcaccgtgctgccaatttctacttcttggtagctgccattctttccgtgttcctctttccccgttcacaaatggagtatg

SEQ ID NO: 50061 - DNA, 428 bp, Arabidopsis thaliana columbia
ctcaatcattttgagttactcaaatgtcgtcagtccataatacaagtggccggttctcatataatcaaagactttcaaagttgtcactttcgggagcacatctaattttgtttacaagactatacaaattagagtgtttattcttacaacatgtaactaaaaatagaaatctgaagttttgaaaaatgtcaaactaattattgttttaaaactgtgcagattctccactcctcatttccaacatgtcaaactaattattgttcattactatagtttctgtaacgataccttcgagcacaccagaagaagaagatgaaattaagagtgcttaaagcggcaataaagtaatagaaacaatccaacttgcttttgtcaatatcatccgttacgccactctgtcctccacgagcagtcacactatgaacaat

SEQ ID NO: 50062 - DNA, 530 bp, Arabidopsis thaliana columbia
cgctaatctattgctgtaccggtgacaaccgttctgttacgattcggtatttcttcatttctcaaaaaccctaatctctgcggtgagattgttcacaaagaatgcaatccgagagccaaattcttcactccggtaacggcggcggtcaccgaagatggttctcggtcaaatagcgcaaataggcggcgcaagattatcccggccaagtcaaaacaaacattcacgattttttgtgattctcggttttatctccggcgcttttatcctcttcatctccgtcgcgtgccttatcggcgcagtgaagagacgaagaagcaaaaccgagaaacaaaaggggaaagaatcaacggcggttgtgacatttgacgcggcggagaggcggaagtagcggcggcgatagaacaagagagtgagatagaagagaaagtgaagaagctacaagcgacaaaaagtgggagtttagtattctgtgcgggtgaggcacacgtttatacgatggacaactaatgacagcatcagctgagttatta

SEQ ID NO: 50063 - DNA, 506 bp, Arabidopsis thaliana columbia
tagtaatggagaggatccctctatctatatcttatggtactataccccaaacaaagatatattatgtatgaatgattcgtggattgatgaaatttcctagactctatgtcaagttacttatttactatttgcgttgattcgatccctgcccaaatttcttaacttggagaaagctgatacattaatcatatatagtagaggactagaggtaaatatattggtccttcttctccatgtcagaataaactcatgatctattgctaaagtcaccacttttcatcatctgaaggaattccttgtaattgactctaccatctccatcttcatccacttgcataatcatctctttacaacattctagggttttaccttgcttgagccccaaggaagtcatcacagaattcaactcctcaacagtgataaatccatcaccgtcttgatcaaacacattgaacgcgtctctcatgtccccttcctccttttcctccacaatcgaaccataaaga

SEQ ID NO: 50064 - DNA, 561 bp, Arabidopsis thaliana columbia
tctgtttcggcaagtctctctttaacgatggacaatgacaataattgataagtgatgacctcggtgtctccgtccctgcttccacatccaaaaggtaagcgacttctaaatcttctttttttctttaagtttcacagtttaagacatcgatcaaattcttttcagatcactggattcaatccaagccaccatttttgtcaggtaaggatctcgattttccctttgtcctatgggagattcaatatcgttgttgctccatcgtttttcttcgttctcctgtggtaaaattggtggatctagtgagttagacatgaaagtggatttatcacagacgcatattgattgttctggcttccattttttgaattcaactcatcacgcttggtaattatagaagccatgcacaaatcaattagaaattcttttctatcgattttcaaaacttcaatagataagaaaaaaatatgaacatatagtttaaatgttgtagcatgttttatttttgtaataggagcatgaaatggttgatagtttacatagctgaaacgaaaaatgtaagac

SEQ ID NO: 50065 - DNA, 386 bp, Arabidopsis thaliana columbia
atttcatcggggaggaaatgaccaagtggacctgtggacgggaatagaagaaagaaaaggctcgagaaaagagaacggcgccgttagcgaagtaacggagagaagaggaagataggtcccacgatgggcctgagtgtacccatcgtcggtccaacgagtgtctttgtattcttcgacaaatatccgtacggtctcgtttctttgcttcaaatcaaactaacccttccttcttcttctttgaatacaacacaacatcatcacttaatataacacaaaatttagatgtatcagattgtagtacacaaatcatctagagataaatgttcagtgaccttgtagtctaacatggcagaagagacaagagtcacaacccatacccatagtat

SEQ ID NO: 50066 - DNA, 527 bp, Arabidopsis thaliana columbia
  unsure (1)..(527): unsure at all n locations
actaataacatccattgctattaaacccattgtaatgatgataattgagatagcacaatatcaacttatcaacttagagaaagtcactttcaacttctgatatcaaattggcattagtgatttgtttatacgctggactagagattatatcaatttgtcaatgtctttgcctgtcacacacacacacatatcaaaactgtcgctcttacatcgggaaacatctgtgcaagttatttttttgtgcgccatattctccgagttgtttgagattacagaattgctaatcaataatacaactcaacatatactagtcacaaattccataattttccaaggtacaattcattgagatcatttgcgtaaacccatcgtatgttcatttgtttatggttttattgggtcaaccatcttatttaatctcatgtgatgtgtatcaaatgtccaaatactgaactttaaacgccanagataaaacttanattcgataatattaaagatagagaagtacagagaattgtagtacaacg

SEQ ID NO: 50067 - DNA, 333 bp, Arabidopsis thaliana columbia
gacttagtcctcaagcccttcacctttcaacctcaacttgtatgcttatctcgtttttttgtttaattcatttcctctgctctgttcaacatgaactgcacccagaggagacggtgttcagcatctcaaacaacatgaggtacagagagactacgggtccatgtggcggagtcagcgtgtgtcgcgttaatttctcttgcttggtcttcaagtatacaagaacttcgattatgtgagactcagtttcagtgtgggaatagcgccgctgggttcccctgctggggaggggaatcggcgaaaacattgcggtcttccatcgctggagcttcactg

SEQ ID NO: 50068 - DNA, 581 bp, Arabidopsis thaliana columbia
caagaaatactgcatcattcagagagcaaaacgatggataatgctgtagaaccaaattcgtcatcaccaatggctgatagtgagtcagaacgtataagtagtaaagattcagataatccagccgtccttgaagcgctcagagcagcaggtcttgctgattcaccaccaaacagcccgacccgttcagtagaagttcttccagagaaaggagacagttccttggacaagaccagggagacaggcccatataatgtatttgacatggattctgttcctgatacagacatctttggggattttgaatatgaattggatgaagaagactatttcggtgctacaatggctaaaaaagcttcagtaatgcagccggatgaaagcttgactaaggtgaaggtagttttatccactgttcaacctggaaagtctttgaatccatccgaagtcgtagaggatgaagagacaacaactggaaacctgaacgagaccacaaatggaacagaagatggaaagagctttgttcctatggagcttgtacctgaggctgagggagaaggagaaggagaaggagaaggagaaggaga

SEQ ID NO: 50069 - DNA, 852 bp, Arabidopsis thaliana
catcatccttgttctacctgccacacgtcctcttagagactccaatgcatctcgaagtttctttaaaagaacatgtttctccaacgaagttgcttctttgagttttgcctgcattcgttcccaaccaaattagccttaaatttttttttcaatcatatcatattttcactttagcaacctagattagccttcttgatcccctatttctgtatttataacaacaaaaaattctttgctaacaaaaagtaaggttatcaccgaattaaaatccctcttattaaatcctatttagtagactcaatcaacacaaaaactaacataaatgtgcaaatcaactcattacatagtaaccaaagatagtaacaatacaagagacacatttcatctataagacctcaacaaaaagagaataatatcagacctcctcagatagcttagcagctgcagccaaacccttctcaaatttatgagcgaggtcacgaacagacaaacgtttctgctggtccataagctgcgctgtctcacgcgcaacaacctctttcatggacatcactttaggatcgtctttaacatcaaatatttgatcattagctccaattctataattaggaaatctacttgaagcaaatttcacatctgctgatactgcaggaacaccatctctctgtaatgaatcccgaaaatcgcgtgtaacccttgtcattgtatctgtttataaacaaaaccaaaaatgcttagacaaaaacaaaataaaagacagaaaatgctagtagatgtctaaccactatgaatagtaatatactccaatggactcacagatctgttgttgaatcttcacaaaaatctaaaaca

SEQ ID NO: 50070 - DNA, 547 bp, Arabidopsis thaliana columbia
attctccagatattggtacaaatttcccaggaaactcaaattcgaatttcagatcgaaatcggtcaaattgcaatcaatttctcttggcgaatgaaggaatttattaagattggtttaccttgaagatgaggtgaggattgaaccagacctcactgatgtgaggaataacgggatcgataaacgccggcctgagataaacgagagtgttcgcggccaggagactcgccgtcaccggtggtttccacggtagtctatagtactccgcgacggcgcttagagccagcaacggcaacattccgcctccacttcttctcccttcaccaaaattctccatttcttcgtaattattcttttcttctgatctctctgaatcacttacaagtaattaaaatctcatctctttcacaatatttatatagcagcagcttggtctctacgaaaacaaattctccagagacttcttcgtttcactcgcataagaacatgtgggacccaccacggcattttagaactctagtttttatacctaatctcttcttgcctttt

SEQ ID NO: 50071 - DNA, 380 bp, Arabidopsis thaliana columbia
attctccagatattggtacaaatttcccaggaaactcaaattcgaatttcagatcgaaatcggtcaaattgcaatcaatttctcttggcgaatgaaggaatttattaagattggactagcttcgaagatgagctgaagagtgtgcctggggtgatagaagtgtgagatagttctcaagctaagaaagttgtaaaagctaagaactagcatcaaatgatggatgaaacacaaggtagttgttgaaaagtcaaacacttggtgatatgaacacaaacgttcaatatgacaaccccatgccaagtaaagagaaaatgaaaactggtgattgttgcggaaatcgtccaggattcctcgaccagaacttgaaatcgtcgagggga

SEQ ID NO: 50072 - DNA, 918 bp, Arabidopsis thaliana
tcctcccaaacacataaaatgcttccctcatgtctccacaactgcaatacatgtcaagaagagcattatctagaggaaatcagctaaactatcagagactattatccgggcatggattagtttccccagtgaatagcttcccaatttactacaaccattcaacacaatcgaatacgtgaactgcgttggatcaacaccagacatcaacatgtttcgaaagaacataagcccatcttctatcttatcatttttcaaactcccaactatcattgtgttccaagcaaccgcatctctattatttacacagtcaaatattctcctcgcagattctaagtccccgcaactagagtacatccccaaaaccgatgtctggacaactacattatctgaataaccaagctttataatctgcgagtttaatgatgaccccattaaaacatcctcaagcacagcacatacttgcactaagctagtgaaagttgaactattgggcttcacgtactcaaacgccatatgggttgttagaggaaacgcataacttgcaaaatctgggttccgggaatacgccgaataaagcgcattataagaaactacgtttctgtgaggcattttgtcgaacactttccgtgcttgttccagtgaaccacacctcacatacattgagatgagattgttatttgcgtacggagactcggtagcggcgccacgccggctggatgaggacgagagcgtggatctgacgcgcccgttttagtaccgtgatcgagacgcatttccgtgtaagttctacaacggaagaagctatttcgttcagtggcataaaaaagctaaagaaagcttcaggttttccaaaagaaaattgaaatagttgcccttttaagaagattgtcctcgcagattctaagtccctcaactgga

SEQ ID NO: 50073 - DNA, 551 bp, Arabidopsis thaliana columbia
tttcagaaccaccacactcaggatgtgcaacctcattactttccgtgaaaacggcagctggtccttggaccttcccgtcatcgcacaaatttcttttgccaacttgctcctttattactctagatagatcataaccacgatctgattcaaacccataactgtataactgttcgtctagctccttaccaggtaaagtaatcttctcttcatcatttctggaaagttcatcagttccacgagaattacaagggagttctttcgatatacaaggcttgcaatcatctagtattttctcttcagtcaaggaagtaacattcacacctgaagcattgaggttatgatctccatgaccagaataagtcgtgtaaactccaccatgtttcagcacttcgcgtaatttaccattagctaaactgctactctggcccgaattttcttttgatgtacagtcaggatcactctgaacgcctggaattattgtcatgccactcaagggcattggtgcattgctgataccatttgaacaaggtaaatatttatcgttctgatat

SEQ ID NO: 50074 - DNA, 647 bp, Arabidopsis thaliana columbia
gccatttgttcatcatgacgtaagctatcctttggaaagttgtttgaaggaagagagcgaccaaaggattgattattgctctgcaccattttggagaacattgaagcaacattagatgtttgttttgcacccatatctttactctgtaactcatgcatattcactatgtccctcccacttaatgacacgtctccattttgggaggataattgatttgtcttctcctgccttgagaagctaactgccatgttgttgccgggcgatggatgcggccgtaaaatatctgactgaggcaagggctggttccaaaaccgaagttgtggtgctgaaataccggctggtgggtcagacatcataccagaagaggaattctgctgaggcgagctggatgccaccagaggctgagaagcagacagcatacgaaatccttcagctgaatgtccacgttgatcaaagtcactactttcatctctttctttcactgcaggggtagacaactcagaagatgaattgactgaattaatagcagctgattgtcgggtacaacagccatctgttgattttggtgatccctctggaataagggaaccagaagtcatgttggatcccctaggattccaggaaatggtcttgatgagtggatgatg

SEQ ID NO: 50075 - DNA, 1093 bp, Arabidopsis thaliana columbia
tcaatcttatcagcaatccactcatcaaggaccatttcctggaatcttaggaggatccaacatgacctctggtttcccttattccagagggtatcaccaaaatcaacagatggctgttgctacccgacaatcagctgctaacaattcagtcgattcatcttctgagttgtctacccctcaagtgaaagaaagagatgaaagtagtgactttgatcaacgtatgctgtctgcttctcagcctctggtggcatccagctcgcctcagcagagttcctcttctggtatgatgtctgactcaccatccggtatttcagctccgcaacatcagttttggaaccagccatctaagcctcagccagttattttacgcccgcatccattgcccagcaacaacatggcagctagcttctcaaggcaggagaagacaaaccaattgtcctcccaaaatggtgacatgtcattaagtgggagggacatggtgaatatgcatgggttacagagtaaagatatgggtgcaaaacgaacatctaatgttgcttcaatgttctccaaaatggtgcagagcaatcatcaatcctttgatcgctctcttccttcaaacaacgttccaaaggatagcttacatcacgaggaacaaatggttggaagtggggagggcgatacatccaaggtgactgttgaaaatggtgattttgatcctcaagagtagctcacaaaggggaacaacaatcaccttcaagatctgatggtttagttagaggtgggttaaataacaaggagtcagcgaatcacttgccgcatttaggccatactgtttctcagagtttctcctctaaaaatcatgcagcctcggttagagcagatcatcaacaaattagtcctcagatggctccatcctggtatagtcaatatggaactttcaagaatggactggtgcagcccatgaatgatacagggagatttacccccttgaaaataggagaacaatcgtctaatgttgagagttcggttgatggtacacatactgttcaatcatgcaagcagtgtcttatggagcaaatgtcgggccgcaccaggagttgagactccctca

SEQ ID NO: 50076 - DNA, 182 bp, Arabidopsis thaliana columbia
atcattctgggttacacctagtataagcgatggggtttggggcaggatgcgcaacttgggtactctaatttccctttctgttaaatgagaacaaaagtaatatcacatgtttttttgtttgtttgttttgttttgttttttgagatggagtcttgctgttgctctgtcacgtaggctggagt

SEQ ID NO: 50077 - DNA, 475 bp, Arabidopsis thaliana columbia
cacaaatatgaaaggaacataccatttccctacaacaacgcttatatcaagaccgggaagcttagaacgaagctctaagttaagaccttttgcgtcatctatgagaccaaagtcttgtagtgtagaagtcgagttttctattgtccagccttgtctcataagaaatgcaggtagtagagcatcatgagcaacaggcttcgcaaagtagtaacaacgggaaggcgacgaggttgtagtgatcactacttgttagtgcatgtcataaggatctggctgtggcttcttatacatatgaacatggttaaatctaattcagaagcagcatgtagctcgctccagctcctgtccagtactagtagatgattctcgtgcacaccaacctgaatgtccatataaattgagactctcatcacatctttggcatttgaattgtctagtcatactgccttggataatacccgcctcgttcatatgt

SEQ ID NO: 50078 - DNA, 506 bp, Arabidopsis thaliana columbia
atcaagaacctcttttcaaagctaagacacgtaaagtgatgtataggttcgttgtgcacttaccatgatttataagcagattgggaatcaaatcatgctaaggaaattataacagatatgagaggaaaattattcctctcattacattatccatgacatgataagtttattccttgcctaatttgagattatacatatagcttgcaaaaccactgaaactattttgtgtgtgaatgaacccattagacaaatgaagagaaaaagacacctgccttaaaccatctcaaattcaatgcaaggatcaattgacttcattggaacttgtctcctctcttctttttatttttttggagtttccttatgttggatttggacacgtctatgcacaggctaaagcatgatgtccaagtggatgataggagaatcttgacctacacgtacccgtaacacctgtagaatcttgcatgtcactaaccaaccccctctatatagtataacccaaaaat

SEQ ID NO: 50079 - DNA, 516 bp, Arabidopsis thaliana columbia
gctacaagaggagaaaaaacactatagtcataacaacgctaaaatatatataaaagtgttctccgtttgttggtttcgtaataaataatgcttcatcatatagtcacgtactgatttgtttacaaagtttgcttacaatctcaagatacgatgaccaaaataccaaagatattactagttatttttcaagactaatattattatcgtatataaatatactgtttttctcataacaacattattttcagctcattgttaacatgcttatatgtgacagtaatatatacacaaattgatacaatatttttgtcaaactttaattttatgacttatcacatagaacagtattgatttgtctatatgcgtccagtgcgataataatcaagtttgactctaaggtataatcaactgggaaaaaattagttccactaaaacaagaaaatatgactcgcttccacatcatcaaccggtaccaactaccaaagaggagatatttgaaaaccaaagtgttaataa

SEQ ID NO: 50080 - DNA, 499 bp, Arabidopsis thaliana columbia
ttcagggaaacaccggcctagctgcttctgtctgaggacatgaagatctcctccaggacaatattccatgactagacaagataaattatccgaagtaaattgcgcgtataatgtaggaagaaaaggatggtccaacattttaagtatttctctttctgcttgtgcccggggagactttttccttctcgccaagaactcgttgtccataacctttatggcaaacaaacagtttgtaccaatcagctcggcgagatagactgttcctatatctccacaaccaagtttcttcagaaggttgaagtgtcgtaaacccaaagagccgtattgaaccttgatatgcttaatcgcttcccatctcacatccatcgacatgtgaggcttattcccacagctaaatcggctcagattactctcctcactaatgcttgtgctcctgctataatcccaagactatcttttgaactcagagagaactcgaatttctcactggaagtcggat

SEQ ID NO: 50081 - DNA, 372 bp, Arabidopsis thaliana columbia
ctgctctgcctagtagatcaaccatacagccatagtgctcaattttagcattcaggcccatttctctcatcacgtggaaccattttcttccttcctccactaatccaccatggttacaagctgtgataaccgcgagcattgtgatctcatctggcttttcttctatcatcattgttacgaatagatccaaagctgcacgtgcattcccattcagagcatacccatgtatcatagcattccaagacgctacttgtttctccggcatctcatcaaagattcttttcgccttctctatctccccgcatttcgaatacatatcaagaattgctgtacacactgtcaccttctttatcgagcttttttcatctgcac

SEQ ID NO: 50082 - DNA, 547 bp, Arabidopsis thaliana columbia
cattgatttttatatacctaactttacaaataagataatcaatacaatatatatagtatagttaatatagggaattagggacgagtgatatgaagaaattatatttacgacgtttctaaaagcggtcgtttgtttattctttacattgttttatcatttttggtggtttgtcattttccaaactattattctcctttttaataaagtcattaaaaaatgagtcgtcaaacttgtgagatattttacctcaattgatcgcctaacttgattatttagctcgtagttgttgacttgttgtcataacgtcattaatcctccaatctcaacattaattataatcaaactttgacaatatttgcgtaacataaaagcgaaaattgtttattgccacaaatggcaattcagcactctttaaacacctatttctactttataactctcgcatatctaataatcacaaaaaactctcgcatattaatgaatagatgttggccagattgtattatatatatcacagtagttcaaaataatttatggattatagatt

SEQ ID NO: 50083 - DNA, 583 bp, Arabidopsis thaliana columbia
tatctgctcattatggatctctcatcgttcgtgactccagattgttgtggccttctatacatggtgagaatcctgaaaccgggtttcacttcttgaataatagtactggaagcattgatctggcaaccaaaacggacattgctcagcattctcagctagaaagcaaccacaaatataacagtgaatatgttggcagtcatcctccacctcattcccgtagtggacagaatttggggtacagtgatcttggtgctagtacctctgatggattgccttgcggtaacaagcaaactgcaagtagactatgctccccatcaagtgatgcaaacattttgccagatgacgagtcatttccagttgaccatgaatctaccgaggggaaccctggacatcaaaaagaaaatattgatcaaacactaggcaatcagaatgctttgcttcttgaagcatcattaagatcaaaattgtttgaccgtctaggcatgagggcagaatctagaggtggcacatgtttcaatgaagagactgtgatagatagaggggatgaagagattcggaagtgaaggacccagagagatacggt

SEQ ID NO: 50084 - DNA, 522 bp, Arabidopsis thaliana columbia
aattgcttctgatagaaatgtgagcttgcagaaattcatcggtttagctgaacttatccccgaacagtctagggttactgaagatggtatgtatcgagccgtcgacatctaccttaaggtaatattaagttagtagacatttacattcatttgctctataccgaatccgtttagatgagactacaaaaactggtaaatatttgacatcttgtggttaaggagatgatcaagttcccattatcttagagattttgaaaaactttaagagagctctagtgaacaactatggttttttcttgcaggcgcatcccaatatgagtgatgtagagaggaagacagtgtgcagcttaatggactgccaaaaactatcacgagaagcctgcgctcatgcagctcagaatgatcgtcttcctgttcagaccattgttcaagtcctttactacgagcaacaacgtctacgaggagaagtcgctaacgattcagattctccagccccaccaccaccacaaccagcagctgttc

SEQ ID NO: 50085 - DNA, 217 bp, Arabidopsis thaliana columbia
caaacttggtatgtgataccttttcggaaagcgcaaagatagctctctgatgaatgaggacggagaatggagttcttctattgtcattgcactactctaaatgctgatcttaatgtagatttacgtgcatttcgagatcattgctatattacggggagaaaattagatgttcggacattgtattcgattattttgcatgtatcacagcgctcataaa

SEQ ID NO: 50086 - DNA, 422 bp, Arabidopsis thaliana columbia
gagaggatccccatcaacaggcatcgataaactgtactacgagttgcactgaagtatcattagtagaaatctaaaaataacgatattagagtcaatatccaaaccttggatcattaatatacccaaattacaagctgttaaaccctgattactgagtagaatgggaagtattaaactgttgatgtaagcgtctactttgactggtaccgttggctatgcttccacattaacagttacagtaatggaagaagatgtgatgagacatgtaatgtaggaagatatccagcaactattgtgaacgttaacggcttaaacatctcacatcagtggatgataagtctgaagttaaagggcatagaagtgtgaattaggtctatagctaatgagacccacaagtcaccgagtcgagtacagatgatcgt

SEQ ID NO: 50087 - DNA, 458 bp, Arabidopsis thaliana columbia
ttcacgtttgacactacgtttgttttagcgaccggatatgatccaggttgtctctccgtcgaaatgccagaagtggagtttgcaagagctctagacgatgcagaggaagccattttcttcagacatgtcaaaccagagatcttttggaggctgcaaggcttgcttgggttaggagatgagaagaaaatgacgaaagctcgctcgactttagatcgtgtttgctccaagtacatagctataaagagagatgaggtaagccgtgggactaacaatgttgattctcattctaaagatttgctgacgtcttacatgaatctggatacgaccaagtacaagttgctgaatccaagtgatgaaagattcctcagagacacaatcttgaccttcatgttagcgggtcgagacacgacaggatctggactcacttggttcttctggcttctcattaagaccccaga

SEQ ID NO: 50088 - DNA, 492 bp, Arabidopsis thaliana columbia
ggattttaataagaaaactcacaagtttattgatatttatgaatatttcattttcatttcggacatgcctagagaatcttttttgggtgtgggtataacgagtgatgagtggataactggacatttaggcttatagcaaaaaatgatatttttattaatgaaataatatgtaatttacatgcgtagaactgtttagactaggctttaagaatcaaattaagttttcttaggttttaatacaagaaacaaaacaaaaggaagaaaaagatcgaacctgaacgaagcaatcatggaaatgtatacgaaggatggcagcggctaaaccaatatctcgcttgaagactttcttgagctcttttctgatgatgttttcgactttcggacatgctttctggtaaaagttccatgagagacctgtcactataggagcagctctactccgcttctttgcctctaccgtgggaaaaaggttcagtgtcccgccattagcga

SEQ ID NO: 50089 - DNA, 1045 bp, Arabidopsis thaliana
gccagtgtgctctaaagttgcagccattgtgggcaatttacttgataacgccttcgaagccagcctgcgtacggatgaaggaaacaagatcgttgaattattcctcagcgatgaaggcgatgatgtggtgattgaagtcgccgatcagggctgcggcgttccagagtctctacgagacaaaatatttgagcagggggtcagtacgcgtgctgacgagcccggtgaacatggcattgggttgtacttgattgccagctacgtaacgcgctgcggatggtgttatcactctcgaagataatgatccctgcggtaccttattttcaatctatattccgaaagtgaaacctaatgacagctccattaaccctattgatcgttgaggacgaaacgccgctggcagagatgcatgcggaatatattcgtcacattcccggattcagtcagatattactggcgggaaatctggcgcaggcccgaatgatgatcgagcgttttaagccggggctaatcttgctcgataactatcttcctgacggtagagggattaatttactgcatgaactggtgcaggcgcattatcccggcgacgtggtgtttaccactgcagccagcgatatggaaacggtgtctgaagccgtacgttgtggtgtatttgattatctcattaagcccattgcctatgaacggctggggcaaacgctaacccgtttccgccagcgtaaacatatgctggaaagtattgatagcgccagccagaagcaaattgatgagatgtttaatgcttatgctcgcggtgaacctaaggacgagctaccgaccggcattgaccccttgacgctaaacgcggtgcgaaaactgtttaaagagcctggtgtgcaacatacggcagaaacggtggcgcaggcactgaccatcagccgcaccactgccaggcgttatcttgaatattgcgccagccgccatctgattattgctgaaattgttcacggcaaagttggcagacacaacgcatatacacagtgggtgcatgataaagcggagaaac

SEQ ID NO: 50090 - DNA, 441 bp, Arabidopsis thaliana columbia
gctccgttccgcattcgatggaatgaaaataataataacagagaaagcagattcgttaacgtgttgagtgttgacagtacaaagagcactgttatttgctctgttttcaaaagtaacagaatactctgttgtcagaagtaaccgaatgcttgtttttcaaaagtaacagaatgctctgttttcagaagtaacagaatactctgttttgctctgtgttatgacagagaactctgtttcgttactctattatcaggttggtcttgttaagttcgaatcaaattttatgatatgataatatatgaaaagaaaaacatcaacaaagaaatcaaattttgacaatggcaaaacacataatcaattacccaaaatgggaaataaatctttgaaactcacaaataacaaaatgatgaaatcgactagtatgagacgtaaaaatggaag

SEQ ID NO: 50091 - DNA, 548 bp, Arabidopsis thaliana
tgtggctagtagaggtcaccacgcagaagtaggaggcataactcccggaagcatgcctccgttctcaaaggcgatttgggaggaaggagctgcgataaaagcatttaaagttgttgaaaaaggtgtttttcaggaagaaggaattgtaaaacttcttcaattcccttcttctgatgagacaacaactaagattccaggaaccagacggattcaggacaatctctcggatctccaagctcagatagctgcaaaccaaagaggaatttctctaattaaagagctgattgagcaatatggccttggaactgttcaggcttacatgaaatacgttcagcttaacgccgaagaagcagtgagagaaatgctgaagtctgtagctaatagagtttcctcggaaacaccaaattccagggttggtaactccgtgaccatagaagaagaggattacatggatgatggatccataattcacttaaaactcacaattgatgccgacaaaggagaagcctcctttgactttacaggcacaagcccggaagtctacgggg

SEQ ID NO: 50092 - DNA, 626 bp, Arabidopsis thaliana
gatgttctgatagcttcctcaattcgttctgatattccaggaccaaactctggcttcaccgacgagatccatgcaccgtggtttatcttgaattcatgtctaaactttggatatgtctatgtaatatattagaaatcgatagaatgtaaaatgagaaaaatgttgtacctttgtaacaatctcattgaactcgatagggccatgagagacggaatgcagaactcttgttgtgtagtgacatcgtcacttgtcatgaaatgtttaaggcttggaacattctgtccaatgtactctccaagattcaccttctttactacagtgttgccttgatacagaacaaaatcattaagtaacaaaatcatcaaggaataatctctgacaacaagttcttgtgatgctttttacctccaaacgatttttccacggatccaaccagaggctgcaccaagagatcatgcggtacactacacagcttgaagcagtcatccgcgataatcagttgagatggttcgatggggttcaagtgatgctgctgcaggagaacgcaacctacacgtttcaaagtggctgtgtcccgagcaaaccatcctaaagacaatgttggatccatcaatatcaagattcat

SEQ ID NO: 50093 - DNA, 699 bp, Arabidopsis thaliana
gaacgttataaaatctaccggtataactacttggtttagttgcaaaccgagcacatttcaggctgacgtacaatatgtattacgtcggcggcgagatagtacaggtcttgattccggttccagctccacaatgcatgcgtctcattcttcacctgaaaaggccaacgtaaaaaaaaacacttcgttttaagcaattttaaattggtacaatctgagaaaacaacggaccggttctgagtttgatccatgatgcttatgcccaagaactattcttagtaggttacttgaacatcaagcgataaagaatagagagagatctaacttacttctagtataccgaaaccgaagctgctttctctgtatgcgctatactccggctgcttaaccggacaagtctcatcttttacaggctccaacgtggagttcaagccgctggatctgcacgagtagttctgagaaggatctggaatatttcctgggtcgtctacatgctgagtctccagcttcccagctcctcctgcaccggttgttatataaaccgggccacattggtctaacgtgtagttgtagactctgtttgatctctcatatgcatcaacctagttcaggttttgtgggaaattagcgtaaaagaagatatttccaaaagcaaaggaatactttaacagaacaacacacattcatgactattgaagacga

SEQ ID NO: 50094 - DNA, 429 bp, Arabidopsis thaliana columbia
tagaggatcaataaccttcgagttccccgcatattaatgttttgttatacttaaacaaaacatctccataacttaaatgtgattgctttttctatgtttatacagttttgcatctttttctttttgtgatcataaccacacagattcacaatacaaatgccaaaattatgcagtatttgtaatgagatgcaaactatacttatgcagaagtttactatcagcattttgctgagatgcctgcattgaataaatttgtttctaaaagtaagtctggtcatctcaccattgtaacatagagttttatagtatatgtcaattactagtgctaatattctcattaaaaagaccatttgaatagatgggattatgaaatattttagagcttgtcgataactacagaattatcttagttataaaaatttaataagt

SEQ ID NO: 50095 - DNA, 445 bp, Arabidopsis thaliana columbia
ctatgcaacttgcacctttttctatattaagttgtgggccacaacgactcatgggccatatttaaagcctcaactacactgctcaatccgtttttgctcctttttgcaaaagaaccctccattttctattttttattgtaagttcacaatatttatttgttgagaaaatatgaacctttgatctctctaaaaatttgaactttttaaccaattgtgcaagtatttttgggttaaactacaatattacgattactatttaaaaatcgttcaaacgaaaaatcagagatcgatttactaagaaatcaatggtaagattgttgaacatttcatatgtgtgataaactgatgagaatttgggatgcaaagcaaattaatttttcctgagtgaattttctttgaaaatatctctcgtagaaaaataaacagcaatcgatctttgcattgc

SEQ ID NO: 50096 - DNA, 1230 bp, Arabidopsis thaliana
cgaatattgggatccacgaagggaacttgttgccatccatgtttgggtgcatccttggttgcctatacttggtcagaagttggagtttctttatcagatcattcagatgaaattgagtaatgttcttgatgcttggcatcccagtgattcatctgcctacactattctttcaccatggaagaccgtttttgatactacaagctgggaacagcttatgcgacgttacatagttccgaaacttcagctggctttgcaagagtttcaggtaaacccggcaaaccagaatttagaacggtttgattgggttatgaagtgggcatctgcagtacccatacatctaatggctgatatgatggagaggttcttcttccccaaatggctggatgtgttgtaccattggttgcgtgctaaaccaaggttcgaagagatccagggatggtattatggttggaaagagttattcccgcaagagcttacagcaaatgagaggatccgaattcagttaaagcgtggtttagatatgttgatggaagctgttgaaggagttgaagtgtctcagccaagagcaaaggcaaatgagcgtacacagtccgtgccggctcaggctcaagctcaggccaaggctcagatggatagcactgaagtgttgagtttgaaagaagtcttggaagtatttgcgcaagagcaggagttgctgttcaaacctaaaccgaatagaatgcacaatggtcttcagatatatgggtttgggaatgtgagtgtcattatagactcagtgaaccagaagctgttggctcagaaagatggcggttggtttcttgtaacccctgatgacttattgaggatgcacaacaatacaactgtttctgcaaaaagatagtttcatttcattttgtaagtttcctgatgtaaaaaccatcttcaatctcatcacattttgtctctctgtcttaaatttcatatctttgacttcttcttatttagataacaaaactcaaataattcttgtgaagtttacacttttttttttcttggtttcttcatagagtaagtaaaaaaggaagtagataatacaacacacgataaagaaacctatacaaacatttttagagtaaccccacaagatgattgatccatcaccagtcgtctgctcctttagatacacccagaatcacagcgattgttgctagaatagcctgcaacgtttagacatgaatcaatttaatggga

SEQ ID NO: 50097 - DNA, 571 bp, Arabidopsis thaliana columbia
tatcccgccatatatatacattacatacacagaggaggagagatatattttttaaaaaatcagctttccgacaaattcgtgcgtccgttcaaaaatatgttcacacttggccatgtcttctcagtaacacccggtcccactccttgagcaattactgccacgttgattatttttcttcggtcaaacctcttgcgagcaattagcaagtctgcaagtgacgacgctccgtttcaataaatattttgcgattggcttgtgtttgatttttctttcttctttttttgtgcgttttttgtatgtattaaagattgtagatgtatgtctcataagtgttttttatactagaaaattagtacgtgaaatgtctgtcactaaaataaatttttgtaacgatatgcacgtacagttggcaggagatattaatgaataaacagttataaatgtagtcattaaacaacaaggacaggcacaatgatgtgattattgtacaactgagatgatcacacaaagttttaacggttgatgaatagcacattattgatggatggataattcagaagaagagaaggtg

SEQ ID NO: 50098 - DNA, 472 bp, Arabidopsis thaliana columbia
agtaaaaaattattgtattccaaagtagcacttaagcaaggaaaggcttaaatactgcaagcataactcaagttataagatcattattaggggtctaccttgcacgaggaattaacattcttgtggcatccaatagatcttgcaattggacggcagttttaagttttgtcagtaaaaaaggaaaaaaaaaatacacggtatcagaaaatccctaataggcggtgccaaagttgaaggtggaaaatcccaagcctctcacatcagctcttggatttccaccagtgtacttcaacatcaggtttaacagtttcacctctgtaacttttagtttcactttctgcttgggggttctatcaccactgtcaagagaagataaacagaactcagggcctcggtgaacagataggagttaagagaggacaggtgatcatatgctacaacatactgccgaacaatagcaatgacacagcgt

SEQ ID NO: 50099 - DNA, 981 bp, Arabidopsis thaliana
tcaaattggcttcacctgagaacatttacagtgtaatctatgaagcattgagtggtcatcgagtcggttggaagaaagctctacagtgtctaaatgagaggtttgcagaaggaaaaaggattggtaaagaggatgagaagccttgcatacttctcatcgacgaacttgatcttctagtaactagaaaccagtctgttttatacaacattcttgattggcctaccaagcctaactccaaattagttgtgttgggaatagcaaacactatggatcttccagagaagctgcttcctcggatttctagccgaatgggtatacagagactatgtttcggtccttataaccacactcagctacaagaaatcatttctacaaggttgaatggaatagatgctttcgagaagacagctattgaatttgcttcgagaaaagtagctgcgatttcaggagatgcaagacgtgcgcttgagatatgcaggcgtgctgcagaagtagcggatcaccgtctaaatactaacaaatccgcaaagaatcagctggtgattatggcagatgttgaagcagctatccaagagatgtttcaggcacctcatattcaagtgatgaagagcgtgtcaaaactgagtaaaatcttcttgacggctatggttcatgagctttacaaaacaggaatggcagagacaacatttgaccgagtggcaacgacagtatcgtctatctgcttaaccaatggagaagcttttccaggttgggacattcttcttaaaatcggttgcgatcttggtgaatgtaggatcattctctgtgaacctggagagaagcatagattgcagaagctgcagctgaattttccaagtgatgatgttgcttttgcattgaaagacaataaggatcttccatggctggccaattacttgtgagttttttttctgtttattgaacactcaactttaaatttaaagactagtttgattcatatga

SEQ ID NO: 50100 - DNA, 504 bp, Arabidopsis thaliana
taatctacctgaacttaaagaaaattagacgatttcaacataagaatatacggtgataatttgcgattaacggttgatgaatcaaacgatttgtggcattgacgtggcatttgggcagggatatacgatgtcgttttggtctgttttatggatgtgtggtatgtataatgaacacgaagcatgccttcatgtctcagaatgaggaggcaggattttcaacccctcatcgacaaagtgaatagttcatggacttctcggcacctttcttttgcgggagactgcagcttctcaagtctgtcatcttctctactattaatttttagacctccatcttcctcttacccaatcagtgtttacgaaaactggagcaaatgtgtaatgcctttctttgggaaggagccctaattcaggcagaggtgcaaaaatatcctgggaaattgtctgtacctccaaagtctgtggcgatcttggtttgcgtgacttagtggcttggaataaggtgct

SEQ ID NO: 50101 - DNA, 487 bp, Arabidopsis thaliana columbia
ttggatggtcaatcggatcgattagtgcggtgagtttctgttcatctcattgagatgtagtcggacagagtaaagccaaaaccgttgttttcgggtccgtcgttgctaataacagaggtggccggggtagagtggttggtagtcacggctcattgcccacttgggttgtgtaaccaatctccaatgtacttctgtgtcccgagattcaacaattcacatccaaaccgaagggaactccatccataagacggtctcgtgcctcgtgacgcactaaggaaattcccatgtcgaaagtatctggctttaagcattctatagagcagactttgtggtctttgtagcagtttccatacctggcttgcaagtagtgcttggttgaattggtacaggtctcggaatcctaaacccccttctctcattggtcttgtcatttatttccaggaaacccatgacagtttcttctttgttgccgtagtgccccaccaaa

SEQ ID NO: 50102 - DNA, 549 bp, Arabidopsis thaliana columbia
tacaggatatgacattagtatatgtagttccaaaacacacaaaccaacaaaggatttggaaagactagtgaacctgaaactgcttttttcgaatgtatttacaccccggacagattttgtttaacaacgcagctacctccttgaggaaatacgggtttattatcgagtacgcgaagtttataaccccgaaatgccctaaaacagagagaaaagtagcaaactcagggaactaatcataaaatgagctaaaagattggaacaatatttgccaaaaccagattctttatgataccttcgcaaacttttcgatctttgctgccacaggttctgcagacagaatccggattcggtaatcctagccgagaatcagtcacctgattcggtgcttcaacctctagcacagacattttatcctataataaagtaccattacattaaatatttgctccatctactcataaacagatcaagaagaataaatcaggacaacacttactcgatcattgttgtttgaaatgctaaaacctatcgaggttagagtcccacggg

SEQ ID NO: 50103 - DNA, 437 bp, Arabidopsis thaliana columbia
ggtcatcgagcccctgatgaatatatagatcgaagtcatcgtcaaatgcctaggatgacaaaatcaccagtagtaagtaaacggcttgacaaccactctaacaagtgctgatataagactggtaagaggatgtgcgactttcagagcacttgtcgtgaagaatctctcaagcaagttgaaggaggtgtctctagaacaagtagaaacaattacacgactctgaaaaagttgtagtaggcttcgtgggcaacaccttatgggatagtgattagactaacttctggtgtaataattgagagctaggaccctgatctcagagtctttgtggatcgcaggcgaaaggtttaggtgctaattcgggcaacagtgggcttagtggcacagaatggatccatcatacatatgggtggacgaggaggtcgagttgatacaggggt

SEQ ID NO: 50104 - DNA, 387 bp, Arabidopsis thaliana columbia
cctcgttgaccatatcgtaggcacttacagattctcatttccgatcagggtccaataaacatcttgggttcagtttaagcattcccctatgcagaagaaataagagagacctttcacctttgtttgtttgtatgaaagaacaacagtaatttttttttggatcaaattagggaacatagttaaatttaaaatttacagtcgatcttaggaaaacagactttagaaaagtgtgatttatctcattaaatcacagctactaatactatacttctatagagggatatatcatgtgtcgatggaggctggtataaatttgagattcctaagcaattttttctgcttatatatatagataattatacattccaaaatagtaattcaaggaca

SEQ ID NO: 50105 - DNA, 600 bp, Arabidopsis thaliana columbia
taaatcactatcaaacatataaaacattattaacaaacagctaatataaaaaaaaggatgtttaaatattgccagcttcttgtatacagcctatggaggcagcgaaacaatgttcttcacaattcccttcggctttccgtctcaggggtctttcgtttgattgatcgtgaggttcgcaacgtcatctcgtcgagaagacataggaagcgttggcgggacgttatggtgctttggatccgttagctcttcccaaatcttttaaagctctattgtaaccttgtttttatttctttttggcttggttagtcttctttagtactcttttatattacctaatctcatttttatgatatttacaagtttagcaaaaaaatatattgccagcatggacatgatccacaactaaaagtgaatcagtttagtatgtattacgcgcgttcgattcgttctttgtggttccaccaaccaacgcctatatatctcttctcacttcactcttctacttcactaccacaaaacagagcaacacacaacacaaagcttcatttcaattctgtttcgagaacctttgaggtaatttaagcttttcttcttatacat

SEQ ID NO: 50106 - DNA, 499 bp, Arabidopsis thaliana
agctttacacatgaacaagctgtcatcagcgaatagcaaatgatgaatggctggcccgtcatggtagaacctaataccacttattagaccttgattttcagctctattcatgagatgagttagaccctcggagcaaagaatgaataagaaaggtgacagcgggtcaccttgtcttaaacctctagagggtgtgatatgtccatgagctttatcattaagtagaaccgtgaaggacattgaggtgatcgtgaacataatccactgcacccatttctgatgaaaaccaagagcttccagcaaggctcttacatagttccattccactctatcgaaagccttggacatgtctgattttattgctatgaactccttcgacaccttcttatgagttctgagactgtgaaccacttcatgtgcaattaaaatgttatccgagatcaacctttcagagacgaaggcagattgattagatgataccaattccgggagaaacggttgc

SEQ ID NO: 50107 - DNA, 574 bp, Arabidopsis thaliana columbia
  unsure (1)..(574): unsure at all n locations
nnnnnnnnnnnnnnnnnnnnnnctaaaggcgtaatcagttaaaaccagacagccgttactacaaagcgattaatattggtttccccaatgcctatgaccgtgcgcatggttatgaagggaaatacctgatgatccacggcgattgtgtttccatcggctgctacgcaatgaccaatcagggtattgatgagatattccagttcgttactggtgcgctggtgtttggtcagccgagcgtgcaagtgagtatttacccgttccgcatgaccgacgccaatatgaagcgccataaatattccaactttaaggacttctgggagcaactgaagccgggttacgactactttgagcaaacccgtaagccaccaaccgtttctgtggtcaatggtcgttacgtggtcagcaagccgttaagccacgaagttgtgcagccacaactggcatcaaactacacgctccccgaggcaaaataagcgccattcgcctggcataatcttttgccaggtttcattgcccgtcagcgggtgtgttgcaatcaccgtgaccacatcattcggtgtggtctgcgagctga

SEQ ID NO: 50108 - DNA, 661 bp, Arabidopsis thaliana
  unsure (1)..(661): unsure at all n locations
ctctaatgacccaccatattggtcacttctgtcattcactttgtctttcaggaactgatcgatcaggtaaccatgtgcgccgtgaacctccactccatcgaagcctgtacttgtatatatgtcaagtgtcttgatcatctaacatccaaaggggaaaagactttgcttaccagcttcgatcgcgtttcgtgcagcgattctaaagtcgttgacaatggcgggaagctcgtcgctccttaaccgccgtggaggcttaaactgacctccatacatgttcttgcacatcaatggcttgtctgtagaggagacgggtgcttccccatttggctggtctaaagaatggagaaaatttagtatacaagaacctaaagcatcaaaatctttttcgttttggtttacaacaaggaggaggaagctacagtttttagcaaaccttgatgaaaaactctgccaccatgccaaatctggcagaagaagataccgcctttcgaatgaaccgcatccacgatgggcttccatgcctccacttggtctctgttccataatccaggtaaatccggatagcttgacaaacagagctcacatgttagagagcgacagtattggtgtatttgactataagctnaaatattataatgagcagagtatatatcccaatgat

SEQ ID NO: 50109 - DNA, 1100 bp, Arabidopsis thaliana columbia
gtgtatataaatcccaaaccagttgaccattaaaagcaaaaacaaaaatgacgagacattgaaaactccatctacctttatctccctcctcttctctctcccattcccaaattcgaacgaacctgcaatccctaaacccccaattatagaccatctccaaattcgctagtccttttctctagtgtagtctaattatatattacaaggttcttgctctcctctctctttctatctttctttactgggttttatattctgttgctttggtggtgtgggaatgaatacttgcgaccgacacttgtctcactgttaaaagaaattgtttcaatcttcgttaccttcaaatgtcgtcattgttatctgttgcgaaattgctttaagtctgtgtcattagtgaaacctcgtaattgaatcttataacttgtaatttttatggtggacatgggagctgttcttgaactcctgctgcatatgtgttgagttttaagctcattttctaatcgctttaccttttcttggtttacagtagatgaattggttacctgaagctgaagctgaggagcacttgaaaggtattctctctggtgatttctttgatggtctcaccaatcaccttgattgcccacttgaagacatcgattccaccaatggtgagggagattgggtcgccaggtttcaagaccttgagcctcctcccttggatatgttccctgctttgccttctgacctcacctcttgtcccaagggcgccgctcgtgtgcggattcccaacaacatgattcctgctttggtcagttcttgttttcttatcacttacttgatagagttttaccctattagatagagtatatcatctatttaaactgaatttgtcttgcttattagcatcattcatgtagaggtgcattgattgtgttcctgattcctgaattttaatccatctgctttctttggttctgtgggtgcagaagcagtcctgttcttctgaagccttgtccggcattaatagcactccccaccaatcttcagctcctcctgatatcaaagtttcatatctatttcagtctctaactccagtgtcagttctcgagaacagttat

SEQ ID NO: 50110 - DNA, 669 bp, Arabidopsis thaliana
atgtgtctatctatctcttacatcaaaatactctttttgataattttccattgatatagaaccaaatgaattgaaaccctatgtctaatttggttctttgacctaaaggctaaaacgtatttttgttatatatagttgagaattggattcttattgatcttcattaattaatataatctcacttgggctctatatctttcatatattttcatctatcaccgacaaatagtattgcaacatgattctgaattttgtttatttaaaaagttaactccatcgttattagcaaataaataaaatatattgtctatgattcttactgtgatgatgatatactattgttgtatatactcaaaaatgtttttcatacattacaagcacataatatctatatagattgaaaatgctgaagttaaaacgccactttgatctttgtatctctaggttcacacacacctatgtccgttcttcggacacccaaacccaccagcaccatgtgcctgtccactccgacaagcgtggggtagtctggacgcactcattggccgtcttagagctgcttttgaagagaacggtggttcccagagacgaaccttttggtgccgaccgttcgctctactaagggaagtcgtgaccgcaggctaacacgtgggatagctatgaaaaaag

SEQ ID NO: 50111 - DNA, 479 bp, Arabidopsis thaliana columbia
gaatttagataatgtattgcagttggattaaatacctgactcttgttgtgtcaacctctttcagcaccccggtggtgtgtttgtccatccatctggtactgaaaaatctctgagagataccatcgatgagctgcgcaagtaccatggagacaaacaagggaagaagtttcgcgtttgggcagatcaagtcctggcaacagacactactcctgggacatggatagtaaagcttgataaatgggagcaagatggtaagctaagccttattgcctaaacctgcatcatctataactcagatcccatcagaatatgacaatactttctcttgcaggggacgaacgaagatgctgcgcaacaactgtcaaattcacctcaaaggtatgagactgtgttataagagtagctcctagaattttgttgatgatcgatatcgcgggatgtgcatgaaggggagggattgctgtgggaacatgttcaac

SEQ ID NO: 50112 - DNA, 541 bp, Arabidopsis thaliana columbia
tgcaaaggccatatccttatgtttacctttttttttggttaaaactttatgactccataacttttagaccgtgaggccaaacttggcatgtgataccttttcggggaagcccaaagacggccctcccagtatagatgtccgcatctcttcgtcatgtccagttgctaacaccttataaggcgttaggcatagatcaagattttccagcttaagtagtctatccatgagccaaaccatttgaacaacctatcgagtaatgaaaaaaaatcacaacataaacaaaaattacagataatatgatgtaatgaaccgaatataccagttggtcttgccggagatcatctcccttcttaaatataagtttgcaacttcctccttcttctggtgttcggaaagtaaggcgcagaggatgcaatgcacttttaaagagtgatgattctcctgccacaatcccctttatgagaacattaggggtaagcggtgatcgaataggctgaaagaaaaacaaaatccaaaagttaatacacaagggttagagaac

SEQ ID NO: 50113 - DNA, 287 bp, Arabidopsis thaliana columbia
gtattatcgaatgaaactattaaagcctgagttatctttttgtatggcaatttatttttcagggaaccttcatttaagaacaccagacatgcacttgcgtctacaatagttcgtctacttggaagcagagtagtttatgaagattatgctgtatgttctcctcgtagtgagctatcaaaggcagaaacagaatcaacaatagatccttcttccatggcagatctctctagtgaagtcttatttgaccggttactgtttgtactccatgggctgttaagcaatcacca

SEQ ID NO: 50114 - DNA, 505 bp, Arabidopsis thaliana columbia
ctctcttcgacattctagagagcaactccttacacgagaactggtaggcagagcaatactccatcgacaaaatccttcaaactcccttcattcttgactgagtcatcaaactgaagttttattacaatggtaaagagattccgccacctctttgacagaatcgatgcgaaacagcttcctttgccgaaaggaaagatacaatgtgacaaatgatctcatttggtagattgctaatcctatccatcctcttgtcaaaccctagaaaacccctttcactactcagttaatttcaattgagacttcaaaccacaaattcaactaacattcacccactgcaaaataatacaaacaggaaaaggagtttcaaagcggagataaacacacttaacttcaacagaaacagaattatacaacagatagagtatatgtgataagaattacaattgaaagagatgagaaatcttcgaaaccaaccttagtacagatgcgaaggcagaagaagaac

SEQ ID NO: 50115 - DNA, 517 bp, Arabidopsis thaliana columbia
ttattgttgccgtctcttctgctgccgggccgacaattgctgcagcaatcctctccatcgcatcctggaaatggttatttttaatcaacgtaccgttagtattatcgccctgcttctggcgatgcgttttctgccacccaatggttctcgcgccagtaaaccccgtttcgacctgcccagcgccgtgatgaacgcgttaaccttcggcctgcttatcactgcgttgagtggtttcgctcaggggcaatcgctgacgttaattgctgcggaactggtggtaatggttgttgttggtattttctttattcgccgccagctttctcttcccgtaccgctgctaccggtggatttactgcgtatcccgctgttttcactttctatttgcacatctgtctgctctttctgcgcacaaatgctggcaatggtttcctgcccttttacctgcaaaccgtgctcgggcgtagtgaagtcgaaacaggtttacttctgacaccgtggccgttacaacgatggtgat

SEQ ID NO: 50116 - DNA, 786 bp, Arabidopsis thaliana
gtccggcttgaaacacaaaaggagaaaaggatacagttgtcacttgtcatctgagaggtgaatatcggtaacctttggggattagcgagagagtgggaaagatgcttgcggcgaatatggattcctcgaaaaaaatgtatttttaatattgtttagttagccgttgagaatctccaaagaatactttttctgttatttcttgaaattgtcaaagctatacgaatcctatataatccctcgtgtgactaatatctagtacatcaatcatataaacttgaattttctcaaaggaacttgatacgtttaaaatacatgggttctactgatgagcccggaagttccatgcatggagttaccggtagagaacagagctatgctttctcggtagatggtagtgagccgaccaacacaaagaaaaagtacaatctgccggtggacgcggaggataaggcaacggttttcaagctcttctccttcgccaaacctcacatgagaacgttccacctctcgtggatctctttctccacatgttttgtttcgacgttcgcagctgcaccacttatcccgatcatcagggagaatcttaacctcaccaaacatgacattggaaacgctggagttgcctccgtctcggggagtatcttctctaggctcgtgatgggagccgtgtgtgatcttttgggcctcgttacggttgtgcctccttgtgatgttgtctgcccaacggtgttctcatgagcttcgtgagtgacgcacaggttcatacggtgaggtcatgattggttt

SEQ ID NO: 50117 - DNA, 525 bp, Arabidopsis thaliana columbia
tgcctataaaaaagattctaacgattctcgggttaggaacgtcgaaaaatgtcttgatgtggttaagccaacgctttggtggttgcggtggtggactagtgttggtggtctttagcttttggtccatgcttttttttcttttctttaagtggaactttgagagtaagcttgagatgaagagactacataagtcgttgaagcttgactctaatataaggagattattaaatttttttcctttttatttgttgaagttgttcaaattcttgcgatttaatgggtgagatttcgaattttgaaattacaataatacaaagtagatgataatgtaactatttacataaaacaacaaaaccaagtcaaaacagtactactagatatttgccttttaacggaactatcgacagtaaaaacaataacgagcctaacatcatctttcattcgacttttgatcctaattgtgaaatctaaagcgacaaaaaaaaaatcggaagggatgacgagagagcaatacttgatatatag

SEQ ID NO: 50118 - DNA, 652 bp, Arabidopsis thaliana columbia
gatcttcacatatcttcgattaatcaccatcttcatcgattacatccattttctttcacaaattcatccatttctcagatcaacgaactcatcaaaatcgattcgttgtttcattcatttccgccaaaatcaaagtcactttctttgggaatcttcttccgctactcaagatcttcttcgttttctctgattctttcgattctttgattctatgatgactactgatcaatacgataaccattactttcttcacaactccgatcacgcaggcttagttcttgtgtcagatcgacttacgactggagctgactttcactcttggcgatgatcggtgcgaatggcactcaatgtccgcaataagcttgggttcatagatggtacaattcttaaacccaatgaaactcataaagattttggatcgtggtcccgttgcaatgatatggtagcacatggctcatgaattctgtttccaagaagattggacaaagcttgttattcatttccactgctgaaggcatttggaagaatctgatgtcaagatttaaacaagatgatgctcctcgggtgtatgagattgagcaacgtttgagtgttatacaacaaggttctatggatgtagtggatattatcagaattggtaccttatgggaag

SEQ ID NO: 50119 - DNA, 536 bp, Arabidopsis thaliana columbia
attcaacggagatccttcaaccaatcacgagatttcgttagcgctggtagggccctctctcgctaaacacatggggtagtatctaaagtggacctgtcacactgcatcgccatgtcatcatttcgggcatcttcaacttaatacgaacttacgaagctttccccggtggataattaaccgttttattaattagccataatcacggcctcaaagcctatataagttgtttctcaccaacaatcaaatcacttatcaacaactcaaaactgatcatcacaaagaaaagagttttctctgataatctttctcggacaagatggcacctgagatgaacaacaagttgagctacggagaaaagaagagagcgtacgttacgttcctcgccggaaccggagactacgtgaaaggagtggttggtctggctaaagggctaaggaaaactaaaagcaagtacccattagtggttgctgtgttacctgacgtgccggccgatcaccggagacagctattggaccaaggctgcgtcatcaaggaga

SEQ ID NO: 50120 - DNA, 541 bp, Arabidopsis thaliana columbia
gtggtgatcaaggcgagccggcgctgctctctcatctcatggagctatcgttgaagctcctccacgtgaatgcaactctcatccaaattacgacgtcttacatgacatcaccataacccttacgaggtgacgtcactcaaccggtcactgaagtataacatgtcaattcgtttttttttttaacatcaaaatttgaactggtaagtgattttaagatacattcacttcaaattgtaaagttaccgacgttgtgtttctatttcctgcatgttagttagtttggtctttactattcaaacagattcgagaataggtgacataaaagacattttccttacattagagaataggtgacataaaagacattttccttacattagttttacagatacaagttatgtagtacgatatttttatgtgtttataggacatggttaggtccttgttccctcaagagtactcgacgaagtttattattgtttcatgcggaatttgattccttgctatagacaatggaatacatgatctatattgacgatac

SEQ ID NO: 50121 - DNA, 544 bp, Arabidopsis thaliana columbia
tgaagtttttcttagttttaaatttttttagttacttatttttttgaagttatattttgatactgtataaaatatttatgggtccgccgtataggagacccaaagaagattaaaggaggtcagctggtctctctagaattctatatttgcattgtagcactttaaaattcatgatattatttatatttctatttttttaccctttaaaatcaataatttttatgtgaatatttaaaaatttatcgtgtttttcttctactgtgtgttttgacactatttcttcgttttcaacttttttgttgattcacccataaacattaaacctggtatttttaaaagatatgaagattttttttagttttttaattacttattatttaagttataaatttgatcctataaaaaagtattttgggtccttgacttgaaatgtgaaattaacgggttcaatgtgatagttatatcctaaacattatacgacacatgtctttgatataggtaaatagatataaatataggtgttgttatagctatataatatata

SEQ ID NO: 50122 - DNA, 577 bp, Arabidopsis thaliana columbia
tacaccagttccttgacacagcttcagtagcttctcaagcgactccacaaacccactattatcctttggattctccatcttaatcataccagtgataactcgaatgagttcttttatcaccatgatagtttcagagacaatctcagtaaccattgtagcaacttccatttcttcaggagacaaatcatcgcctaaatcgtcatcatcatcatcatcactagacatattatcaccagatgcctcacattcagataaaggacacgctggcttcacttctttcatctccctaagaacatccttcatggaaaccgcaacctgtgtaatagctctaccaatcgcagtaatgtttgttgcaggaaccttcttgaaactggaacatgcttcccaaaccactcccgagagctgcggaatagacggcttcttatccttctcatacgatccctctagttcacagatacaaaaacaaaaccatcaacaactaagcactcactagaagtagcaccttgaaagcaaatcaaactgtggcataatggaagaaagtgtaaaactttcagttaattaccgtatagagaaacag

SEQ ID NO: 50123 - DNA, 574 bp, Arabidopsis thaliana columbia
ccgttcacgtaacggcgcgttttcgtcaaatgtcacctttggaccaccttcgagggactttgagcacagccggtgagattagcacagactcccgcgtaaaatcaggctgacgtgtcacattcttagcacctctagaaacctccgcgaaggtgttaatgaaattccacagcgaggttccgtcagtcacggcgtggttaacggagcatccgatgaaaacgccgtcgttcagttccgtcacttgaacggcgaggattggtctgttatgtccctcgtagctcacagctctgtcgtaggtgaaaaactctttgactacatcgggaacgtcgattccggcgatcacgtcgctcacgtggatggattttgcttgggcgaaaacaaaatcggcgccggcgtcattgcaggtgaggaaaacgtggccggaggaggaggttgagagacggccagcgagaggagggaagtgggtgagagtgattgagagagagtgtttgaggtgtgagataagcgcggggagaggaaggttagggcacgtgaaaagacaacctttttggatgtagtggcaagagaggatgggaag

SEQ ID NO: 50124 - DNA, 405 bp, Arabidopsis thaliana
tacgacaaaaaagaagaagaagtactatcaacaatatctccataaataaagaaatatgaaggcatgggtgataggtttgctagtgatctgcgccgtggtgattgcggaaccagtggagagtcggaattacatagaatatggtgcgattaacaagtgtgccggtcctaatcctcctccaggatgcaatcctcccgggactgaacaaaaaaaccctactcccgttaacgagtatagccgtggctgcagcaaaattcatcggtgcaggcgcgattgaaccgtaatgatgttcatcatataaaattcttcatttcaatgagccccgaatctatttgcttttcatgcatatgcatacacttgtatatgcgtatatgcaaggtgttatatgtgtttcaaatgaattaggta

SEQ ID NO: 50125 - DNA, 596 bp, Arabidopsis thaliana columbia
taccatggaatcgtaataatcattatttcttccttaaaatggtcgagacatgttttccttaatgtccaattttcttaacgatctgacttgtgttgtctcagtcaaagagcttgattctacgaagtgaaaacatgagttatcgccctgttttctttagaaaggttagttaaactaacaagacacagttcacctttgtccatacactgattacatgatcggcaagcttgagtcttggttgagttttgacaggaggacttggaaaaatctctaatacgagcgtccagccaacagaaccgacttaaccctgctctgaaaccaggcgatattcaggttccttgttatttaactttagtctccctatttcttgtcaatccataattctgtcatctcatattgaaattcatgattttgtattccaaaggttgcagttttcgaagatattgtcaagggaatgagggtaaacaatcaaacatgattctgtaatgcattttcctttaagaatgattggttttgctgaacctgttttcccgggcgaaattgcaggaaagcacgacgtcaaactgtggcgacattgtgtttatccgcctggttttgag

SEQ ID NO: 50126 - DNA, 609 bp, Arabidopsis thaliana
ggattagggttcttctgttcggccccgggaggattgcatcccggagaggattaggaccagcgcacttgttaatcgcaccatattctatgtaattccgactctccactggttccgcaatcactgccgcgcaaatcactagcaaacatatcacccatgccttcatatttctttatttgttgagatatatagctgatagtacttcttctttttctttttgtttgttgtaaaattgaagaaagatgggctactttatatatacaattagaggttagaagatgcattagatttagctaaattaaggatgtaaaaattagctagaagatgaattctgagttatttttaggtttgctttcatatttttgtaaatgatgaagtgcaaagaagatgaaaaagatttctttttgattgctgtaaattgttaaaaccgtctgtattgactaattaaccaacacttaaatcgaatcaggattgcattatttttcatgttatcacataaatattatttttttctaccatatatgaaacctacgtgtacttaaaataaaccacgatgtatatggatcgaaactgtgcatcctgttgaattttagcgttcatgataagttgtga

SEQ ID NO: 50127 - DNA, 934 bp, Arabidopsis thaliana
tcaattttttgaaaagataaaaacaggggagggacagagaagaaaccagaagaagagaagaagagatggaaaatggaaatggagaaggaaaaggagaattcataaaccaaaacaatgacttcttccttgattccatgtcaatgctctcctctctccctccttgttgggatccatctcttcctcctcctcctcctccgccacaatctcttttccacgctctagccgtcgacgcccccttccccgaccagttccatcatcctcaggtaccaaaactattatcttacatcataactcaccaaaactaagaatgtttctgatccttttctgtgttgttgttgttgtttgtcaatgcaggagtcaggaggtccaacaatgggtagccaagaagggttacagccacaaggtacagtgtcgaccacgagcgcacctgttgttcgtcaaaagccaagagttcgagccaggagaggccaagccaccgatcctcacagtatcgctgagagggtatctcattgttcacttcctccatatccttcttctcttatcttgtgtttctgattgtatggttttgtacagcttagaagggaacgcatcgcagagcgtatgaagtctctccaagaactggttcccaacaccaacaaggtattcactactttcctaatttatgaatcttgtttggatttgcataataaccgaattggttgatggtgagatgcagacggataaggcatcaatgttggacgagatcatcgagtatgttaggttccttcagcttcaagtcaaagtactaagcatgagcagattgggaggtgcaggatcagttggtccacgcctcaatggtctctccgcagaggtcagtttcttagtcgcttatggctttcaacatatgtatagtggcataccaatcatcatcaatcgtcatggtttttggtaatgt

SEQ ID NO: 50128 - DNA, 585 bp, Arabidopsis thaliana columbia
tacatatcaaattctgtgtcaaatatttttcattttggttataaattaacgttgaataactacagaatatatatttgtccaaaaaaaggagatatttgtagtggagttttattgttccgtcctctattttaatcgaatgcattcaaattacaatataggcttattgaaacgaacaaaattacacaaataatttgtggaaaagaaaaaaaaaaaaaaaaaaagacgaaacgcgaaaaaagaatccaatgagcgaaacggccacgtcatcaaaccgcgagtcgggggcgtccataacaagccgttgaacaaatcgccgaccttattgacacgtggcgttatattgtgaacacacgtgtgcctggacgcacacgaagattgtccttaagttatgtgacggtgctcactaaacaagagcgaaagaacaaaaataaaaaatatgagccccactttgattttctaatattcacgaatcgatgttattgtccctcatgtctttataagtacaatactttaaaaattaattactactttactttgtgaaaaactgtacttattaatatactaacttctgattttaaaattaga

SEQ ID NO: 50129 - DNA, 708 bp, Arabidopsis thaliana columbia
gtttgccggtcgttgtttgtttgacggtctatgtgttgttcgttagagagttgctttgattatagtaattatccgtcaaagtttatgttattaagtttaagtcaaacttacaaagattgaatatatgacataacttatgtattaaaacaacaatttacatcagttccattagtgattctattaaatagatgaccataaactatgtataaaaagactacaattttttaaaaaatttatattaaaatatacacaaatggaccttggctttcgctttacaattcaatatccagttataaaatgccaaaacggtaaagaagaccggaatcggaaaaagagatcggacctctgctgatggacgcaaacaaaagtgaccagagccttagatccggcgtactcaagatttcaaacttctctgatgcctcgaaagatcgatgaccaccgccggaagagaggcaaagattgcttgggacattatttcctcatataaagctggtggtggtttctacttgaatgataaatttaacaatctaaaattgtgaatgtgaggttaaaagttttaaaattatgagatcgaaaaactcaaaatttgatgtgaatgctctaattgttgtttatttgtttttctcttttaaatgttttttagtaagacaataacttagtaacgtacaaaatttcacgtttatggtatgtgccttaaaatatagtttg

SEQ ID NO: 50130 - DNA, 296 bp, Arabidopsis thaliana columbia
atcatttgcaaaaaaaaagaaaattgaaattaaaatgtaaagacaaaaactatataaagctttataaaaaaaaagactaaaaactattcatgaaatccttgtaaaatcacataccgagcttttcaccgatttctaaaacaacaacagttcaatactcgaaaagtatatattacaaaaaaaaaggcaaaaaagaaaaaaagaacgaagctatatcagaagaaagtgatgactctatcacctctatggtgcagtcgttagaggaatcgaactcggaactctacttaccaaattttgaa

SEQ ID NO: 50131 - DNA, 535 bp, Arabidopsis thaliana columbia
cagtaataggtagggatgacaggatttgaacccgtgacattttgtacccaaaacaaacgcgctaccaagctgcgctacatccctttcaataggtttacagtgtcattgtagagaattcctgtcttgttttccacatcctccttcttttttattggtatatcaaattcatttcttctttttttctcatatcagataacaaagatataattaaaaaatttacttttttttttttttttattctctcaattttacataaataggcctttacgttttcaaatggaatcgataagatcgttctagtcgacaatattaaaattctaattttgaaagcggggggacggaagttacatatacaaatacaagaacttcttaattacatgtacatctgtaattatatatattactatatataatgtcatacaataccccagaaagaaggaggatttctaatgcgagcatctaaaacatatctttccgtcagcccggtactaagtactctatggttcggttcgttagcaggtttattaatagagat

SEQ ID NO: 50132 - DNA, 584 bp, Arabidopsis thaliana columbia
tgtaactatcctaaagaaaagaatgttgttttatatgaaatagttgtacattatgttttaaatctgtggttcaattttcacaatttaatttatttggtataatataatttgaaaatctcattttatttttttagaagtagtaaaatcaagaaaacttaatactatatgaaaaatttatgtgcgataaacataattacaaatataaatttaaaaaataaatatagtgacattcaaagaaattaagactaatgtgggtataataagtctattaactattgggtattctaaaacaatatgaagcggtatcaggacatatgataaattttgtaaaatcatcgattcagttcgggcataaagtagatgaagctataaaggcagaaataaaatcgatcttgggtatacataatatcggaggcatgggttcctatctcggactacctgagagtttagggggatctaagacaaagatcttttccgttgttaaagatcgattacagtcgaataaatgggtggtcactaaattcctatcaaaggagggaaaaagtgatgattaatcagtagcagaacattacgacttatgtgat

SEQ ID NO: 50133 - DNA, 498 bp, Arabidopsis thaliana columbia
gtttctgctgctggatcgaattcgaatggttatttcattattgaagcgaatggtggattgaatcaacaacgcttgtcagtatgtttactctctctgtggcctttgattgaattttagtgagatagtgttagtttgttgattagagaggtatgtctcgtttcttgatgtagatatgtgatgcagttgctgtggctggactgctgaatgctactcttgtcattccgatttttcacttaaacagtgtatggcgtgattccaggttactattgtggtttctaatcttcagatcaagttgctatctttggcagcatggtttacttacagattccttttgctttttcctattttgggttggttacagcaaatttggtgatatatttgatgaagacttcttcatatatgctcttagtaagaatgtgaatgttgtgaaagagctccaaaagatgtacttgagcgatataactacaatataagcagtattgttaatttgagattaaa

SEQ ID NO: 50134 - DNA, 556 bp, Arabidopsis thaliana columbia
atccccggcaaatccactgaatcttgaaaccattgtacaaatcagtcttaatacgcacagattggtcccagttctcttgtcatgaataggagtccatattattgttggagtcttcccaatacaatttgacctatatatacatgcacgcagcataattacacgatatgggggagccacataaatctggatccttgataacaaatttgaaaccatcatacttggaatggtttctatatcttgtgtgttcaagtcactgttccgatgcttattccaaagaggacttgctttgaaaactctgtttgctgggagtcttttgtagctgtagagccaaatcatagctagactagtcaaagtttcgtctctgttaatcttaaaacatcattttaataggtgaaactcaagtttaagctctttaacttctcggtgcagtatgcgccaatattatcatcaagagcttgagacgattcacacgggcagttagttgaatatgtttgcattttattgtttttgcctaaatgtgtagcactagtgacatatttggtcgatgagaaatttt

SEQ ID NO: 50135 - DNA, 546 bp, Arabidopsis thaliana
ctctgtccggatcctcgatagggagatcaaccttatgcgtctcaagaaagggggtgaaatcaggggacgaagcgtcatgagtggtgggaaatggggaaggggagatttccaagaggaagacggtgacggcttggaacggacgggagttgaagagcgtggaggcaagaccagactcggtggcgacaaagagatgcgtgaggcgctcaaaaaccgccatctggtggattagcttgtgaatgaaagggacatcggtcggcgtagcgaggcggatccgggaaaacatacggtggccggtcggtgaagtctctggcacagtgtttggctctggtgctgcggttggaggcgccatttttctgttacttgtttttgaagatagtgatgtgaagattagggtttcgagaatccatatatatatactataaaaatttgatgttacttgcttctaaggctgctatctatcatgtttaggattagaaattattttacaagccaatctaactatgccacatatgataaactaaaacgctatctcatcctttttttgac

SEQ ID NO: 50136 - DNA, 548 bp, Arabidopsis thaliana columbia
  unsure (1)..(548): unsure at all n locations
atccctcaattttgaagttgaatcaagatattattatttttgaaattgtacagatatttcaccatataaagcaacaccttatgttttgtgtgaggtagcatagaaaacatatcttatatggctacataatttgggttgaacaaaggaaccgacaatcttactatttattaaaataaccgttaataatttaaacgaaaagttgtgattaataaaccacattagtccaaaagtgtaaaaacaatatttattaagatttttatcattaataaaatcttaataattttaaactttacaattattttttattaatgtataagattaaaaaaagttaagaaaatatttaataaaaaattacgttttgtatcggctaacggtccaataggaaattatggaagagtcactttcaacaaatgcgattagtcgattgcataaataggccagttaaatgcataacaggcccaatattttggcccaagtcttgataattcgaattaaacgaaaaaaatcgctgaagctcatcggaggcgaaaatggcganatcaatggcg

SEQ ID NO: 50137 - DNA, 1052 bp, Arabidopsis thaliana
ttgtttgctatataaccagtttacctctgtatcaaaacgcagggtgcagacaaaggatttgccactgtcagtggttacagtgacgtcttgaccgggtctaatgtcactaacttttgtaggaaggtggactgtgtagcgttcatgaccagtgagtccaagggtttccgcgtcctccccagccttgaaacacagaggaatgatccccataccagccaggttgctgcgatggattctctcaaagctcttggcaattacagctttcactccctaatttgtgcttaactgttacgatcacaagacatagccacaatctgacaactgttgtaaacaatgtaaagcttaccaaaagcaagggaccctttgcagcccaatcccgagagctaccacttccatactcagcaccagccaggatgatcgtatcctgttcagcggtcttgtatttctgaaagcatatgtgaaatgagttagggacttaaagaaggatctatatatatgtgttgaagctgtctgacgattcaacttacacttgctgcatcgaaaacgctaagcttctctccagtcggaatgtgaacagtgttggggccaacttctcctttcaagagcttgttaacaatacggatattggcaaatgtaccacgagccataacctcgtcgtttccccttcgacttccatatgagttgaaatcttccgaaatcacaccacggtccattagaaactttgcagcaggactagttttttgaatgtttcctgctggagagatgtggtctgttgttacactgtccccaaagttcaacaagcagtaagcatccttcacttcacgaggaccaggtggatttgcggtcatattcttgaaatacggaggttcatgaatgtacgtggagtttggatccaagaatataacgtggaactcggtgcagagagttcattccacaaggggtttcctctgttattgtttcgtacgagctcttgaacatgcttggtagcacgctatattgacaacctatggaagagtatcaggaatgttagcaaggagcatttaaaagtgaatagc

SEQ ID NO: 50138 - DNA, 1353 bp, Arabidopsis thaliana
cacacctagctcaggcactcgctccagtctgtaagccgtataacaccgacgactcaaggtcatcgtcacgacccacaaccaccagatcgaatgaatcccctagtgaactaatcacttgcgtgtttccacgcgatctctcactatctcttctctgtaactgattttcggtttgctcattgcgaaattcttgaaatcgtttataaggtaggactctgctaattcggattccacatctactacgtggttctgctggagggagctcttatggcggaaatggatcatcgtgacgcttacttccgggtgctctgcgattctcatggagaaagctagggcttctgcgtcatctcggccttcgatgaagatcactgcgacgtttcgccatgtgtagctcatgaggaccgagcggcggccttctgtttctcctcgatcgatgaatattccgacagaacaaggtgccttttctagcacgttaaggtttatgttacggattgatgggttcacgtggtctaccgtcccgtctatcgcgtactgtttgtggaaagggatgacgatgagcgtcgctttcttgtcgagggcgagagtgcaaatgtcatcgttgatgctggagaatggagctgcagctgtgaaatgctgagccattagggttccttggttctgctgttcgaatcgttggaaaccgttgacgatgtgagtggattgaactgtgttgggatcgagtttgttcatctgatgatgcggcacgagcacggcgtgcgctcgacctttaagctcgacaaggtggagtgtgaagacagagatcgggctgaacctactcgggtaagaagcttctagaagattaaccatggaaggtacattttcaacgttgtagacacagagcaggagccggaactgaaggttccgttgtctcgtatcgaggatcgttcgcttactcttgcttctgtagcgtttagacgggtcatagaggcaaactacgaggaaccgcgaaatacctgtcacgagcaagagcgtgatgataaggagattgaagcattctgtgtttagaacctgcaaaatatgaatgaaaaagtttgataatgtgttcatggaccgatcttatgtttagagaaatctgatcacacaaatgcaaacaaaacaatataccttttcgtctttccacatgacacatgtgtaaatctcaatgactccttggcaacacatcaagagggccaaagaaaatgcgtctccgatttgtatgttgcaataagcggaagctgctgctgttcctaggaatttgcagccgtaggtgatgagtataacggcctcaatgatcttcacgtggctttctccgataatgaagaaattggtctgcaatcc

SEQ ID NO: 50139 - DNA, 529 bp, Arabidopsis thaliana columbia
aattatggttataacttataaactttcattaaatcaaaacatatttctaatgtttttcttgcctttttttctggtgaacaatcaacatatatttttcagtaagctccataccctcgtcagatttattacagatcaatgaagtgtagcttattggcagaaagacaatcttcttcaatgacttaaccagatgaatatttagttaaaacaatagtttaaatattttaaaatcgaaattattggtgaaattttaagattagctaaattttccccgtaatgtcattgtctaactcgaatttagaaattctgcatttttgttatacgtcaacgcctcttaacgtaaaaaaattcacaattggtcacctctaccaaaaggttgactttgagctcatcataatagtaaccagtactaacgcggttcagacaaaaagaaaacaattccatctttcatttctttaattacccacatatatcttcttttgattctcactttctagcgcacaaaaacaaggaacaattaaaccaaagtgcg

SEQ ID NO: 50140 - DNA, 542 bp, Arabidopsis thaliana columbia
gactagtcagattgtctaagaagacatgctaaaaactcagccaaatgattcaaaatttcaaacattttcttcaaagatccagaagccaatgccgttggatttgtttaagagtgtcaataattggtggtctatgttatagatgatttaagcttgttttgtgggaaaattagattcagttaaatagacgaaagacagaaaacttatctgaattgtttgaatttgactaatatgtatctcatttcattttgttatcccaaatgccaagacatctatttcttcagctattcattttcatgatttgtttctaggtttaatattgcaaacagagattgcattcaatatataaatctaatatcaagaagaagagaaaaaaaaaactagtattgctaattctcctccgctaattacataagacttcaaagtttgttcagtgtaatcatcagaattggagcttgtttgattgtttgcaatttgcaactttcctctaatttagtcgtggaaagctctttgtatatataaatctcattagtagacttcacgaa

SEQ ID NO: 50141 - DNA, 571 bp, Arabidopsis thaliana columbia
ggtccatatagccaccaacacaatagtatggtttcatctttcccttcttggattctctaatacataaaagtaacgagacacaggtggtgatgaataatccaacctgatcaatcccaacgattacaaagagatttttgaagggtttttgattgtagatgctatgtatctctgaactcggtttgaaccggttatgtggtaaagatgagaagaatcacagagtctcacttgttgtgggattatttacccacttgggaaccggatttggtaaagctctttagaaacatattctgctttcacaatccggttatcatatagccttccgtgtaaagaatgggctgcatcacatgtcgcttctggtcttctgtactcaatgaagatacaacccgtctcaaatacatcctcggggtcttcttcttgttcttcttctatcttgtcgccagcatcccatcttgtcttcacggtacgcactgatgctacttcttgtggattctctgcctcggcctgcgcactttcttcaacaatcttttcacaatgctcttgttcagtggagtgtagatcttcatttcttgag

SEQ ID NO: 50142 - DNA, 356 bp, Arabidopsis thaliana columbia
tccctgagatctcaggtcaaattagagaaaagtagggtactatgttgaaaagtctctaagcattaaatgggtttggttggatatcagaagtgaattaacttaggtaggaatgttgcttgattgcttgcatttggaattgaagtttcgttggccattttagagtgtaggtgtgatcatgaatgagcaggcgatggcgtacgtgaatgtggcagccattacagcaacagcagagtcgtctgtgattgccatggaaggagaggcagagttgcactggatgagagtgtgtacgaagtatggcaagttcggcaaccaaatggctataggagtctctagcgcctcgtcagcctccattgcaa

SEQ ID NO: 50143 - DNA, 468 bp, Arabidopsis thaliana columbia
cgttcttgctgccacggtaaaacatctaccaaatatgatattaggacaatcagatctctaatgcggatatacaggaaaacagtaatagagtcggttgctagcactcacgtagtatccacgcggaacatcctttccacaaatagggaaatttcccagggtatcgttccctccagatttttcgtaagagcaatttccagaagggcataaatcatcatagttcactagaatttctgcagctcctttccgacacctatagaatataaatttcacaattagtgtggaaaaagaaagtgatcatcaaaatgcttgtgacggcattaggataatgacactttaatttacctcctggaaagatgatgtgctgctagaagctggataaatcttataaatgaagcacttgtttcagatgacttaatggcctgtacacgacatgaaactacttattttttaacgaaactgagcgaatgg

SEQ ID NO: 50144 - DNA, 496 bp, Arabidopsis thaliana columbia
catcgattggaaaactggatttgcacaaatttgtgatacatatcactcttttgttgtcactaatctcactatacttgcataataataacatcaataaatttattagcaaatccattgttttttgtttcctacgtttataatattctcttatatatacaagtaagtgaacactcttaaacagtttaaccctaaataatacagcttcacggtggatttaacttctaaagaagaagcttcgctctctgttcttcttccgcgacgcgtttcttctatctctcgcaatctcctaagaggtaagcttctttcattctcctcttagataattgtttcagcgattgatgaaccaccctcttgtagtcttgtaggaactttagctagatttatgagatctaatcgtaatcacccaggatctaattgttgcgatcgatttcatcgttttcatgtagacccctaatttttacattcatgtgtgctcgcagacgttgaatacttccag

SEQ ID NO: 50145 - DNA, 550 bp, Arabidopsis thaliana columbia
ccccaccttatccagttggacctcaagtttcttggataaactcttgtaatcaaattcttcctttatctttaacatattctctaccttcatggcctgcccaagatttaaaaacacttatgaattgaaatttctcaacagacttctacactaggggttaggttaaagtagtaagagcccaccctttgaccaaataatatagtactggttgtctctcctctatgacgcggagagggaccaatggtcacaattagggatgttcttgctgtgcctgaaatgcaaacaacaaatggtaatatagaaaagtccatttattaggaattcagaattcaagacaataggacttagcctatgagcaataagataactaaccaccaaatgaatctctcaacaagcgagtaagttttgaatcacgaagtggaacatgagggctattctcagctattgcatttatgcatttccctaaagcactaagtgagagattaatggatttagcttcctccagcatgtgtccttcgctgcctgcattgtaagaaaggtggtggtaatgagc

SEQ ID NO: 50146 - DNA, 588 bp, Arabidopsis thaliana columbia
ccctaatagtaaagagaataataagtgtagaggaagtgattagtgccttaatgacagtccaattctgatatgcaccaggagaccatggattaggactaacaagacgtcttggtatcccttgaggaacacttttccaaggtatgtatgatatacaagtccacactaccaccattactggaacaccataatctgctataaacccacgtaaccattctgcaatgacaaggataccgatgttcctgaggttcttgcttggagaagtaaatgacttttagacagatttttttggtttttgattcactgtttgaataaatatcaaggttccttaccagcaccaaatctccaagaccttgcttttcggctttttagtccagtatagagaagtccagaagacaaaaccaaaccgaacattccatttgcaaacacccaagcaggttgaaactcagctgatcttggatttgttcttccggggacaccaaactcatccacaatgccctgaaaagtagagttcaacataaaggaatgcctttggtgcaaatgctagtataagttgtgaatgtaattgataaagaaagctcttttacttac

SEQ ID NO: 50147 - DNA, 339 bp, Arabidopsis thaliana columbia
agttagtgagtaacccattaaaaggatcagcaaatgttcaattataggccgtttaaagaatatctgataataggatgtgaataaaggagaatgtaccagtttttgggtgcgtagtagcgtgacaagtttgcaaattcccaccggagaattgggtttgcataatcgagccgtaatttcccagagcagatttcaataacgggatagattcgagaagagagaaaggagcataaagaacagaaaagagttgtaagtagaatgatgttactttggtagacattcgaaagtgagaacaagattggtggatggaaagagacaacatgttgctatgattatgtttgg

SEQ ID NO: 50148 - DNA, 379 bp, Arabidopsis thaliana
atcttccattgtccaacacgacggatccggaggttatattcaggctttctttacaagttgtcattgacgaactcaactcaatcgttgagttaccgaagaagctcgctgaagagacggacgatgagggactcaaatcggcgcttagtgtttgcgaacatctgttagacctcgctattgatcgtgttaacgaaactgtttccgccatggaagttgttgacgggaagaagattttgaatgctgcgaccattgacgatctccttacttggctcagcgccgctgtgacataccacggaacgtgtctcgacgcgcttgatgaaatcagcacacgaattcagcaatcccactgaagcttaaatctggcatggttaactcgaccgag

SEQ ID NO: 50149 - DNA, 530 bp, Arabidopsis thaliana columbia
  unsure (1)..(530): unsure at all n locations
cttaaagaaatatgtttgtagagatgaaaacatgtgaaactgttagaactgacccaatcatattggatgacaatggtcttgttctctagaaactgatgtggtttagagaaaaagcaaagtttttgctttaaggtgtgaaatttactaacttattgtttacgtttttaatgagaatatgttaagtattttaagcttggtctttatgaatgcacagatttaggaacattggatgatttaagtacttatgaaaatggttagcctttaaggctgaacaaaagcaagagatagagaaaattatctcttttcaagaggtgagtcaattttattgagactattagtagtataaggctaaaattaggatgaaactaagataattaagttcttgcttttttctataggatgaaactgattcaaataaagaagaatgcaaaaaggaaagcagaagaatcagtccttaagcatagctccgaagttatcatttctaagcaatcctaaagattttttatttattatcatctnttttttttttt

SEQ ID NO: 50150 - DNA, 970 bp, Arabidopsis thaliana
ctgggaagagaacctgcgcgacgatggctaagctgttgcttgtgaactctgtggaattaaccatggcggatttaagcttctgtgggattggtgagttgtagttatcttcatcaagcgtgtcgccacacgtcccgatatctgttacggcggactaagccacgttatgagatcgccgatcgttgacgaattcaaattcttcttcccgccactaattacttcatccaaggaggaaatagtatcgttaactgaatcaacccgcgagtcgaacacatctgcgcaaacactaagcgccgatttgagtccctcatcattagtctcttccgcgagtttcttcggtaaaccaacgatggaattgagttcgtcgaatgtaacttgtaacgaaagcctgaataaaaccttcggatctgtcgtcgttttggataatggaagcttcgagatgcttgagatacaagaagcagggtaattagttacattacacacagttctgaggactgaactcggtgttggatgaggtgactttcgaagccgcggggactgaactccgtgtctttcgtgtattggaaacttcgcgatgatcgctaagctgttgcttgtgaactttctggaattgaccatggcggatttaagctttagtgagattggtgaattcgcgtactctgttttgttctggctgagttcatcaagtgcgtcgagacacgtgtcgtgatctgttacggcggcgctaagccaagtttgaatctcgtcgatggtcgacgacttcaaaatcttcttcccgtcaccaacttcttccatggtggaaatagtatcgttgactatatcaatcgcgtcgttgaacacatctccacaaacactaagagacgatttgagtctctcatcgtccgtctcttcggcgagcttcttcggtaaaccggcgatcgaattgagttcgttgatgacaacttgtaacgaaagcctgaatctatagggtcta

SEQ ID NO: 50151 - DNA, 743 bp, Arabidopsis thaliana
tcaacttagcaccataacagatagcattcacagcagaatccttgacaacaagtctcttgtaactcgtcaatatcatctcaagaggcataatcaccctcctaagataagactcatctctggagttgtcatacacaaattgggcatccatcacatcatgcatagtaaccatgttattattctcacccaaaatcccagacctaaccctcctaagctcctgcatatgcccaccaaccccaagaagtaaacccaagtgaacacacatagtcctaatgtaagtacccgcctcacaagaaacccagaaaacaaccaaatgcctatcagcatcatactcaagcagcttgctttcatagattgtcctaatcctaagctgtcttttaacagcagagatcaaaggaggcctctgaaacacagctccagtgagcgattcaagagctctagctactttagcaacatcagggacagctgagtgaagccgagcaacacaaacgtactctttacccgcaccttgctgcgatttcacaagccgtgtggctcggtcaatacagacaatgaggtttccagtgacttttgggtcaagagtaccactgtgaccggttttctcaacacggaggatacgcttaatccaagcaacgacctcgtgagaagaagggttcgcgggtttatcgagattgatgacactgtacctgatatactcttgaagaggacgtttcagaggagagtgacagcgctcgatggagtgtagt

SEQ ID NO: 50152 - DNA, 526 bp, Arabidopsis thaliana columbia
gtaacgtccgccagtgtgctttaaagttatacactgacagcgatgctaccagaatgacgaattcagcgcagaagctaccacgttgctgtcgagattatggaaaatcatcacaaacgggctactgttggatttcacttccacccacggatagagcgccagtaaaaccaccagtgaaccgatgtaaaacagcaggatgcgatacaccacctgatttaccgcttttggaatgcttttttccggatcgcgcgcttcagggcagtaatcccaatcagctccagaccgccgaagagaacataattaccgccagcgacaaaatcagcccattccagccggtgcgagagaaaccaccgtagcgccagaggttgtcgatactggctttctcgccgccgtgaccagaaaacagcagccacaggccaaagccgatcataccgatgattgccagcactttaatcaacgcaaaccagaactcggtttcgccgatataagcgcacgttcaccaggttaacggcgttgatgataataaaga

SEQ ID NO: 50153 - DNA, 913 bp, Arabidopsis thaliana
tgtagacttcttcctcaagatcaccatggagaaaagcattgtgaacgtccatttgatggacttcccaatcttttgcggctgcgactgctaaaagagttcgaactgttgtcattttggcaaccggagcaaacgtctccttgaaatcaataccttctttttggtgattacccataacaactagacgcgccttatgtcgctcgagtgttccatcagagttaaatttcaacttataaagccatttactacttatggctttcttcccatgtggtagatccgtaatatcccatgtatgattagcttcgagtgcatcaatctcttttgacatggcttcgcaccactctttaataagaatagcatctttaaaatgttgaggctctttactatcaagaatggcagcaataaaagtaatatgatttgcagagaaaccagagttagtcaaataatccgagagaggataaagaactttaccagaaaccgagtccaaggatgttgaagtggggacaccagaggagagaacatgtgagggagagtgtatattgtgtaatgcgaaggtcgtcttagctttaggatttgtgacaaagtcctttagtagaactgatggcctcttctccctacagcctttccccaatagctcaagaagaccaggagaagaagaggaagcagatggagaaacaggcggaacaacaatagtattggccggatcgatcggagtggggtccggatcaatcgatcggggagtagctggcagagacttgggatcggtcgatccgatgggtggatcgatcaatcgagtaccatctggaagtgcagaagtcggggtagtagtagtcggatcgatcgatccagtgttgggatcgattgatctggattgtggaggagcaacggacagatactagacggtatagggagaacc

SEQ ID NO: 50154 - DNA, 530 bp, Arabidopsis thaliana columbia
gtaacgtccgccagtgtgctttaaaggatagcattgccagaccggactgataacccgggttcggtgatgcaaggaaattaatatcctgcgcgaaatgcccaccatttaataacaaaatagtaatgcttactaacagcaatactaaattcagacacattactgcaataccgcccaccgcagtaatgcgggcaattttattaatccccttagaagcaacgacggtgaccagaatcatccatgccacagccagcagaccaaccacctgcgtaggctccagtccggcaatacgccagtgctgggtcatgtcgctaccatagaggaatgttgagaacggtacccaaactttcgcggaggtactcaccatccagatgatataagaggaaaaccacataaacgtaccaatgaaggcaaaacgtggtccgacactattattcatccaggaatagataccgccttcttctttgcgataacagctcccatttcagccatcattaaggcgaatggaataaagaataacaatgcagaaaata

SEQ ID NO: 50155 - DNA, 491 bp, Arabidopsis thaliana columbia
aatcgagtatatcgatttgagagcgaattctctgagtggttcacttccggatgatctgaaatgtggaagcaaactctggtttatcgacatttccgacaataagttaaccggaaaacttcctcgttgcttaagcagcaagcaagatattgcgttgagattcaatggaaactgtttatctctagagaaacagcaacatccagaatctttttgtgttaaagaagttcgcgctgcggctaaagctgaagcaaaagcagaagcagaggctgcaaatgaatcaggaaaaagaaaatggaagaaaggagctttaatcggcttaatcgttggtatatcaatgtcggtattggttttagtctgctgtgtatttatcttgctcagaagaaaaggagtaacaaagaagcatgtccaccataatactgtccaagataatcatccaactactggattgtcttccgagatactctcaaacgcaagtaagactttttcctaaaaaa

SEQ ID NO: 50156 - DNA, 533 bp, Arabidopsis thaliana columbia
caccattatgactaattcaagttaagtttgtacttgaccattttcttatttttcttctctaggttcaaaggaagcatgtctatgacttaaggcaactgctgttgacgggtgaaaacgaaagttgctctcagcatatattccagtaagccctacgcttgtagtagcatttgttatgcccatgtgaaagaagccatggtacttcaaccgctgactattgaatatgaatttaacacacaattatttcctaggtacatgcaagctgttgtagatgaaatcgttgttgggaattctaatccgcagaaggtaaagaaatctgtcaagtagatcttcacgatgctccattctctaaaacaaatattttcaggttttgctgttatgttcattttccaatatcttatttcttgttgtagcatccaagatactggagcttggccaagttattgaaagagttcatggctatttcgggaacctactggatggctagcttctttctttgtgttccacttatgatagtacaatatcttgctttgtga

SEQ ID NO: 50157 - DNA, 467 bp, Arabidopsis thaliana
tatcaaacttactcagcatttaaatcaaaatcaagattgataaatcatataattgtgtaatgaactaatgatgtatgtatgtatatgtagatgtgggatgtgatgacgaataatgaggcagtggagatagtaagaggagttaaagagagaagaaagagcgcaaagagattggtagagagagctgtgacgctttggcgtaggaagagaagaagcatcgccatggatgatatttctgttctctgtctcttctttcgtccttcttagtttaactcttctttaacctctctattacttatatacatttatcaatgtattttgggcgtcattgaacaacaaaaatgtgatacatatacatttttacatagaataatagatgttgtgaggagtgattgagaatggagagataggtgagtaaagagttttataatggttttgtttgtaagtacgacatgtaatggttcatatat

SEQ ID NO: 50158 - DNA, 951 bp, Arabidopsis thaliana
catttttcttagatggtgtaattccaagtaacactgtttctgatgaggaagttgaggaaagtgaagcaagtgaagaagaagaacaatcacctagcaaacacgagaaattagcaatagtggaatccaccagtaggcaacagggagaaagtactctcaccagcactgagatcgtacgtagagaggctagtgagttaaaagaatctctgagccctggtcagcaacacgtttctcaaaatactgccgtaaaacctgaaggaagacgtagcagatccggtaagaaagccaaaaagagacattcacagcaaaaatacatgcaaaaaacggatggttcctcagggttaaatgaagaaagtacttcacgaagagatgatattgctatgagtgacacagaagaagtattaagttccagttctagatgtgcttctcctgaagattccagaagtaggaaaacacctcttgaagtaatgcaagagtcttccccaaatcagcttgtaatgtcaagtaagaagttcattggaaagtcaagtgagctactgaaagatggatatgtagtagccttgtatgcgaaagacctctcgggcctccacgtttccaggcaaagaacgaaaaacggtggctggttcctcgatactttgtccaatgtatccaaacgagatcctgctgcacaattcattatcgcatacagaaacaaggtaaacctttttctctctcttacttttcatttatcttgcttacaatgccagatagaccattataaattggttttggtgcatgaacttgttttccaggacactgttggtctgagatcatttgctgctggtgggaagttactgcaggtagctcttacattagagagtgtacttccattggtaactcaatgttgctcttatggaactaaaagtggttgtgcatgggtgtgtgtgtgtcagatcaatagagatggagtttgtg

SEQ ID NO: 50159 - DNA, 304 bp, Arabidopsis thaliana columbia
ccagcagatccttctggaatggcagaattcattgcagcttctgacaccttgaggctaaaatttggggtggagtttgaaggtgacagggccttcattctagcttgaagagattcatattgaggtcgaggctcacccattccattacggcttcttactccagaccttttatcacttgccatcagtactactaatgaactcagatccagagtacctttaaagtaaaaatattccgcgtgaatgtctgaacagctcggtaagtataatgatgccaccagcttgtcatcacttggggggattttgtagg

SEQ ID NO: 50160 - DNA, 328 bp, Arabidopsis thaliana columbia
cctagaggatccccaccccgtcgaactcggtactcaggtccattatacagtaaatgtctagaagagatatctcgtcctagtgtgctaatccattgaaatacttagaggataccacttttttatacgcaagaacgcaagttcggatgtcctaagtgtgtcactcccgtcaacttcgtcatggttgtaactctggttatggaatgactcggtatcctccgttgatttgctagtaggagacctgatactgttcaagatgcgttattcggagcaaacaattggatgcaagtcgaagatgagacagaaagttttgcgacgagaaataagcgag

SEQ ID NO: 50161 - DNA, 513 bp, Arabidopsis thaliana columbia
aaacagaaggccaatacttcaatagcaggagtcccaccggctgttataaccatatttgagggatcaaatgacacattacctcccattattcgtgacatgaaatcagcaaaagcctgaaacatgataggaatagaagaaattcaatttccttcgctacattgttgggacaactaaatccacaagtttgaatacacaaatttctgatatataatcaacattcctttgatcctatacaagaacatatatcaatcaaaccacttctaatttctgatacacgtttgcagtcaaatatttaactaataactgcaaaaagctatccttcctcaaaaaatttgaagaataagaaagtgaatggtgtatgcacttaccactctgagttcaagtaatccttcaaaaggtttatacatggcgatactactaatatcaaattcagcatcatcagattgcatcattgactccatcaaattctctgacatccatctctgtagcaagtcaaagcacagctacagaact

SEQ ID NO: 50162 - DNA, 565 bp, Arabidopsis thaliana columbia
attttactggccaatttaattctatttattatatgttttacatattgtcctatatcaacgggacaaagtacattttcaaaaaaatctaacgtgattattgacttgtagcattttcattttgttgttgttggcattattcacttgtgtagcacaatattacgtattaggcaaatccataatagtttggggagtaaaacgtaataattaacaaaccaaaggatttggaagtttcataaattgtcttaaacttctcaatgtgacattttgcaccccttttattgtagcgacgcaagaagaagcagctatagcgtacgatatcgcagctatcgagtaccgtggactcaacgccgttactaacttcgacatcagccgttatctgaaactcccggtgccggagaaccctatcgataccgcgaataatctcctcgagagtccgcattctgatcttagcccatttataaaacctaaccacgagtctgacttatcacagagtcaatcttcgtcagaggacaacgatgatcggaaaacaaagctcttgaagtcgtcacctttagtggcagaggag

SEQ ID NO: 50163 - DNA, 551 bp, Arabidopsis thaliana columbia
tgatatttagctcacatacctccccaacaatgctctttagcactgagtgggtttctgagataacttcttgcataaagaaactttgtatcttttctgcgagaccagagacatcaccgatcagtgcataagcgtcgaggacctaaaggtatgagcacataaacaagttaaatctctgaacaaaatttctagttctccactaaactgaaggcccacaattcaatccttttagtttacaaaggagaaagctacagagatacatgagaatgagttggcttactaaccattacataactatcttctttgaattcctggcaaacgcccaacaacagtgaatccagcttatgaagagttcttcctaaccaaaccttgaaaagagtatgagaagctcaaccgactgacgatagaaaattatgaagacaatggttggtcatgaataagctataactacctcaacaccacgggtcatctcttgggctgctgagaactcagatagactgtcaagcagctgcaaatactctgataggacttgaaatgcctgcataataaggaat

SEQ ID NO: 50164 - DNA, 1177 bp, Arabidopsis thaliana columbia
caatttcattttcacgctgtcctggtttgtcaaaaacattagaagcagcatgcttctggggcaggacatgaggcctcagatcaaaacccctatcccaaaatggttcattctttgaatagccatgatccctgtcccgatctcttaagccatgactagtatcacgttcatcatcagcccaatcagatcgtggggccaaacgaacaagaggcagtggccctgcaaaatactcctttttcctcacatgttcagatgaatgtaatccatcagagaaactaggactctcgctgagctcattaccaagccggctacgcccagactggttttggggtctcatatctacaagtgaactgctcataccagagacacctctcggctcttttgaaaaatcctcacctgcagcttgcttctgcttctgattcagaccctctttctgtttctgcccagacacagaagctgaaggcaaagaagcctttagggacggaaaatcttcacccctcaaagttgccactttctctacatgatgaaaagcccgttccataggctcagctgcaccaacccgagaagcaagagacgtattcaacccattactccccctagtaacaccttcaccagtatggttaccaatatcaccatcagtagctgtagcagcaggcttactccacccaataccagatgaagcaggtctagttccactcccagcgatccctccaccggaatgaaaactcgaaccagacgaatcaactcgctcatgctccttacggagggaaggaaggttcaaggggggtggaacagatagtttctgcccagcattttgcgagcttcttggccgtgaaaggacaaccatacttcctcctcctccaacaccaccaccgccatatccaccacctcctctcccccgcccataacctccagattgattatactgatgatgagattgatatccataagacttattcagattcacagacgcgtacttgtttccatctccatgattagccatttcccgcttccgccggtcactgaacatccccaacgcatcaaaccttaaacctagatctgattcttctcccagtcaaatttgttcgcagtgtattgcctcagatctactagagtgacgaattgatcaaaaactggaaaatcaatccaagaatctcccctgaatcaaaaacaccaaaat

SEQ ID NO: 50165 - DNA, 536 bp, Arabidopsis thaliana columbia
gaattgctaatactccaggccagctcaagatttgtaagacttaatatctagacttggcactgaataaattatacctttggcatacgcacagcgttttttgcagcatactcacataattttcctatctttcgatcatttatgccttcctcctgccagaaatcagaagcattgataagttaaaccaacccaacaagataacccagagggacatccagttttctattatagtacctaagatcgaaaaagtttaatatagacaagggaaagcatagaagattagaaaccaaaaatttatgccactctggaaaaattccaaacacagattgcagagtggttgatttaacaattttgtgcttccagaagcatggcaacgtaagtcagtcatcaaccataaccctcagtaattaaagagatttaagtatgaacttgtcaaaggaaatcaaaatccaacttgcatagactacaagaagtaacaagtcaacacaagtctaatagaagggagatgaaaatggctggatacgaacctgattacgagg

SEQ ID NO: 50166 - DNA, 150 bp, Arabidopsis thaliana columbia
agctacagcgagtttgcaaggacgagcacaggtcgtccctgatcaatatactgaatctcggacttcaggagatctagtattttatctggatggagctcatagtccagaaagcatggaagcatgcgccaaaatggttttcggtatgcggtt

SEQ ID NO: 50167 - DNA, 539 bp, Arabidopsis thaliana
ctttgagcaacgttttgagatctatgtctccgattccactaatgtgcaccattgaatccttgtctcctacttgagatgtgatgagtccatacaatgtccaagccacaggtgttgcccagtagtaccatctccaccatataggtatttgctgcatttttaatcaaaacaaaaacctaaagttaagctcttaaaacacttttgttgatattatcaaagtgtaagttgcttaatttaccggtctggggatgaggaaaccggagaagaggttccaaagactgaggaagaaggacatgcagattccggcaatctgatagtttggtgtcaaggccataagcatcataccgtatagcgtaaagtagatgaagcttgttaacatgtagtagtagaaccacaagaatttggccatagtccagttacatccgatcattgaatatagaatcagcgtgtaaactccggtttgtatcgtgttgtacatgatttccactgctacctacaccatttttagatacatttttggttagttctgattgtggcttaac

SEQ ID NO: 50168 - DNA, 940 bp, Arabidopsis thaliana
gttgcttagtttatttaccggtctagggatgaggaaaccggagaaaagattccagaaactgaggaagaaggacaagcagattccagctatttgatagtttggtgtcaaggcgacaagcatcataccgtatagggtgaagtagacgaagcatgttaacatgtagtagtagaaccagaagaatttgaccacagtccagtcgtatccgatcatcgagtaaaggataagtgtgtaaactccggtttgtatagtgttgtacatgatttctactgctacctgcatcatttttagataaccatatcttaggaaaagtagcatataaaagttgaggcaaaattattagaatggttaagtacctgagaaattgcatagggaatggcggagtacattccagcggctttttcgcggtagaaaaccgttcgctcaatagcaactgcgggttgaactgttgcagcgttggtggcaccgaggaacaatacagcagcatacatggctccaaagaaattattcaggtcttgctctttctctctgttttggtgtttttggatgaatacgtcacattttgataagatgatagtttacttatggaatagagaaaagaagatgccttacattttagttcctgtttgccagaaaagtagaccaaacaagacaccaatgactactgtcatgagaaaccgaatggcattgtactgaggatatctccagtttgaccaatacattttccagaagcaagctttggtttgagtagaaaatggttgcgcgtacttggttcggaagtagagatcattcgatcccggtggtggagtactcagctctttgatgagttcctgatttctcctgagtaaaacatcaagttcatattagaaacacagtgtaacaactctgcattagtagtagcatttttcttaaaacacataccgattaacagaggagttaggga

SEQ ID NO: 50169 - DNA, 464 bp, Arabidopsis thaliana columbia
taaataacataatgatgccaatatgagagatcagaagtgtatatatctatatatattctgtacaaaatagcggatagaggaattaaattaccagcttattccttccaaagccaatgctttgaatgttatccaatcttgcaacaatactgtagatcgaatacaagccaacctagcctcttcaatggatttttctgtcatctgtagttatgaattatgacacgttttgggtgcaaagacttagaagaatctacaatatataagaaaggaatggccacagcatggtggaaacgtgtccaaaattgataatggggaatattccccatgcgtcaatgttcagaaaaaatcgagcctagagaactgaaacgtcggcgaccgaaattgattgtttaattttcatttcagattagttaaaatggaattacatttggctcagcactgatgatattattataaatgtagatggt

SEQ ID NO: 50170 - DNA, 528 bp, Arabidopsis thaliana columbia
gactacaaataattcaccataagattgtttaatttacaaaaatccaaaagacatttcaacaggaaattttgtgattatttatattatgcagaaatttttatcatttgccaaactctctttgattagatatttaactatgtttttaatataaaaatataagtttattaaactttgtgcttttaaccaaaacatcttatatttatataaagtaactatttctatacattttcacattttaaaaacgtagttgtggtagtttaccattcaaaatattcattacattccacgttttaaaaaattacttctactagtatatatatattattgatgtgttaaaacataacaaattacatcactaatcctgtagagttctttttaacgttttctaattatagttcttttttagttataacttatctaatttgcagaaattctatttagtgaacctatttttaacgttttaacttattttcagaaattctatgtagtaaaatgattttaccattagtaagatatttactatttata

SEQ ID NO: 50171 - DNA, 496 bp, Arabidopsis thaliana columbia
gactaaatatatatataacgccagctgaaaggtatctagtatttcccaaaaaaacaaacaaaaaacaacaaggcctatcaggggtactacagtcatttaaatatatacacaagctgaatggttcccaagtatgcttgaacaaaccataagcaaagatatgtttttaagaccagagaccaagaacatgaggaagatttgcattttaatgtttcctgtctgacttattcttgttttcaataggaatgatctctctttctctttctctgtctctgtctctctccctctctttgtatccctctccatctgttaatccctctgcctcagtatctgtttcacaatgaactaaagagaaaattgttttgttagagctggagacaaagatttgatgaagagactgataaaactctgttctaaaccctaggctttaacataaaacctaaccttttgcagttctaactaatgtaaatgcaaaaagagacacttagtaaggtgcaga

SEQ ID NO: 50172 - DNA, 574 bp, Arabidopsis thaliana columbia
cgttgattaatcattctatatttatatatgtactatttaactattgttaatatagtaagtcgattatatgcaaataggcatactaatctctggtttgaaatgtcagaaagctgtgttgcaattgggtatccccgaggagaaaatcagaatgaaagttttgtgaccgttgcaggatttacaggtatctttgtaagttacttttctaaatttgtagtattgatattgtgggggaaaaaaagtttattcatgaactttaatttttagtataggtgttacttcgataacaatagatgacaaaaccgggaaactgacggtagtgggagacattgatgtaccaattatcgtgatgaagctaaggaagctatgtaagacagagattatttcggtagatgctgttaaaccacctgagaaaaagcctgaaccggagaaaccggctccacctaaaccgagtgaaaagattgcatctccggttccgatgaacttagcagaacgagtacaatcctgcctatgcctattcttctgattcttaccatcaaccaaatacttgtgtgattatgtgatttttctagagtta

SEQ ID NO: 50173 - DNA, 591 bp, Arabidopsis thaliana columbia
  unsure (1)..(591): unsure at all n locations
agaggaaccctatatacaaaaatataaccacaaaaaaacaaaaaaaaaaaaaaatgaataaatcaagaggaagtaaacaatcacttgaacggaataaattcaacagctgaagatggttctattgaaattaatggaaacccaccatcgaagaagaagacaggaaactggaaagcttgtccctttattcttggtaaacacaaaaaaaagataacccaaaaattcttgttttatcagtacttatatatcacctccaaatttggtctcaatgtacaggacacgaatgttgtgagagattagcttactatggaattgccaagaatctaatcacttactacacaagtgaattacacgagtccaatgtttctgcagctagtgacgttctgatttggcaaggcacttgctatatcacacctctcattggagctgttatagctgattcttactggggaagatactggaccattgcttctttctctgctatttatttcattgtcaagctaatcaatctctttggatacttgcatttgtttgtttaggtgatttgcatagttagttaatcttggtttttgaatttcgggantggctttgttg

SEQ ID NO: 50174 - DNA, 1120 bp, Arabidopsis thaliana columbia
tccaatttttttttttttaatctgtaaatgtgcgatttatatttgaaaaatggtaagaagactcggataatactgctatttcatagtcaagaaaggaaatgtcctcgaaagcctcagtttacatgtggatccctccaagtaggaattttattgattagtatttgttttgctaaaggagactttcagatcttgactctctacatcacatctttactaatatctcattctctaattgtttcaaaattattttagttttggacaattgaatgtattacgtgaacgatcttggtacttgatattcataaataagttgagagcgacttaactatgtgtgtgtgtgtgtgatatttttgtatccatttgattagtatataagcaaaagacaaagtatagagaataatattctgtataggaaaaagatcaactattactaaatgattaaaagttaaagttaacaaaacgtataaagatcaaatttatcatacagtaacataaatttttctgaataagctcatatgagaaatgtatattacagtagctaaaaaattacactcttccatcaaaactaacttaacacattatttgaaataagttatcacataatcacacaatttgattcgtccgttacaaatctagagttcccatatggttgatagtaagaatttgcataggcaggattgtattggtaagggttgttcatctgaaccggccaggcaacaatttcagccggtttagctggagctggagctggtttaggtggagccggtttctctggttcaggctttttctcaggtggtttaacaacttcaaccgaaacaagctctgtgttacatagcttccttagcttcatcacgataaccggtacatcaacttcaccaactactgtcattttcccggttttgtcatccattgttatcgaagtaacacctatttagacaaaagaaaaaaacatgaatataagttcattttccaaacaatatatcatgttataaatttcgaaaaatgtaactaataaagttacctggacatcgagaaacggtgacaaacgctttcttcctgattctttcctcgtgaatgctcaattgcaacacagctttctgttatttcaaaacagagatca

SEQ ID NO: 50175 - DNA, 527 bp, Arabidopsis thaliana columbia
  unsure (1)..(527): unsure at all n locations
caaaataataggaaagtacaaaatattagatttaactaaagatattttaaattaattaaaaaagatatttggattatatgataataaatccaataaaaaataataaaatccagaatacagaaaaaaattgcaagaggggaagcagaagaagaaagaacaaaaatcaggagttggcattttgaagacgaaactcatcatcatcttcttcctcagacaacaaaaaaagcttttcactttctctccacccttctctctctccttctgaaagtctctctctttgccgtcgttagcctcttcctacacttggggctgcgattcttccaatcctccgatttcaatttcatcctctcaatgatagtttgaaatcatcgagcttttacggtgctgttggtgtttgacgccgtaaaattcgatccttttttatacatttgatgttgattttatcgatagttttgtgagatcgattttttagggtttcgagtttggcgctgacttgagggnttgattggatgagaataagggggtat

SEQ ID NO: 50176 - DNA, 568 bp, Arabidopsis thaliana columbia
cctgatagagcctcctttagggttttagtcttaggtcttgaatcaaatggtgaaatgggtttatcagctattgttaggcaagatgctcatgagtattatggtgaatcactcgagtttatcgaagaagatgaagaaatctctagtgggactagtgtgttgatctaatgatggagcgaaagagttgagagcttgtagctctttcttcatggttctatattcagtcgagctcgaggtttgatcatatcgtaatactaataccttccgagtatgcccgatgagatgatgcgtcgttagccaaaccatatcatgtaggcttgtaacataggaatgttaccgagtatgcgagttttgattgcctgaacttggatctgttccaagtcactcaagtcactcatgtctatggagacatttatagcttcaaattccattacaattgaagttttgatatttgtaaagctcttgttgatgttataagtacaatttgagtaatcaaatatttataaagttcagtcaccttaaacaaattgaagtaaatgctgatattttgcagtttcatgaaagactgagt

SEQ ID NO: 50177 - DNA, 492 bp, Arabidopsis thaliana columbia
gtgtctgaaacatcatggatgaaaataacttaaaccagagacatgggtatgcatgggccacggatttaaaagctccaaacaccggaaaccaagaaggttagaagaaatcttgctctatatgatatatttcgtaatgatataagaacataccatgatagttccagccgcagatgcagctctagcagtagcatattcccctacattagtttcaaacagagtcgttagaacaagccttagtctttgtctctagcgatactaaaacaagttttcactctctagtctctacataactcagtatttaccatcagggtgagccatcttttgcatggcagttggagcaaccatgatgggcatcgagatcttgaaccccaagacggtggttgtcatgtcaatcttgctcacatcaatcagaatccgaggccgaaagctattaaacagcccaaggtatgcatcacagctattgtaaaaaccaataacaaacagtatttcttg

SEQ ID NO: 50178 - DNA, 431 bp, Arabidopsis thaliana columbia
tcgtcccgatcgtgtagaacaatcgcctgtcgacttttaaaggaacaagagccggaaaattcggtgtgttgaggctcttgagctttccgttatagtccaaagcaaatgatgtgtcgttaggcaaaggaagctttggtaggattggtaagaccgtgtttggtacgcctttgtattgaagaatagcggttactgttttgttgtctacggatacaggagcgtccataaacggactagctgccatgaagtagcggtttggtgaccggtcggttttgactaaaacattagtggtttgacctggtccgagtaaaatggctttggttgtgaatggtttagtgtagaccgcatcgatttccaccacggtcatgttgtgtcccgcaatcccgaagaatagctcgtcgtttacagctgcgttgataatccttagaagatat

SEQ ID NO: 50179 - DNA, 594 bp, Arabidopsis thaliana columbia
ataccacgaaaagggagaaaaacaggtatagtaatagggcaccacgagaacagaacgtcaataatgaagcatatatcgtacttgaagaaaataaagaaagataaagccttgtataaatcacatttcgaaccaatccaataaggtatagcatcattatactacaaacactgaaagacagaaaaatttgagccttgatataactcataactcattctctggacatttagaagttagcacaaacaatcttaagccatgcttcctatgcatcttctaccccatatcaagatttctaaaaccgctaactacagagactaggactaatacaagcagaatttgtttaaacacttatacatcctggtttgtgttaatcagttttcaaacagagtcactcttcctggttttaacaacattcaagctatctccatctgataaccaaaaaaaatcaatagtggcttttacactaacagtttatcatctaagtttcaacctaaaagtaaacataatctccacgaatttcaaatacctaaaccaacgaagacataaagaaatcaaaacgaagagaacaagaggattacttactatacccatgacacg

SEQ ID NO: 50180 - DNA, 622 bp, Arabidopsis thaliana columbia
tgttttggcaatcaaacatgtcaactttatatttgatgaggcaagtccaaaagtacgaaaggagattttgtttttgattttaatagcatcaagtttctaataagggcttaaacccaagactagggctagtgtgagcccggaaggtttcgcttatctatgtaaaacccctaattttcaaatcagcgttgaatctaactactaatggcgtctccagtcaccacgaacggtaaagagccattggttaggaagcagaaaaagagtttgtcccttcctcatgatgtgttagtaagctgcttagcccatgtctcgagattgcactattcgattctctccttagttttgaagaacttccgatcactcattgcttctccggagctttacaagactcgctcactcttaggtcgtatagagagttgtctttatgtctgcttacgttccccaatgaatctcatccacgttggttcactctctacatgaaacctaatcaaatcgtagccaataacaagtcaaattgtaatcttttggtccaactccaactataagttcttctcctgcgcactggttatgctcatagcggttggtctaggatttattactcatatgcacccatagagtgtcatat

SEQ ID NO: 50181 - DNA, 433 bp, Arabidopsis thaliana columbia
taaccgatccaatggcctaaaacttgtttttacgaaagaaacaaaaaaattaagtgtgattcaactattatcatcctacttaaaacgaaaaattccacactaatgaaaaatataaaaagtgagcacaatacagaccaatataatattcatacgattcatcatctccatatgtgtagtcggggtagccaatgttacaattctgcacaaattttaattaagctaaaaaaaacaaattaattaagaaaaaatgcaaaaccgttctaaactaaaatctctttagtcttctcatccatctctaacaaagaagacagcggcaagaaacgtacggacatcgaggaagtctcatcggaggaagaagatgaagaacacgacgtgtaaaacgacaagggagacgatggagattcgcacgagtcatctattacgcaagaagtgc

SEQ ID NO: 50182 - DNA, 489 bp, Arabidopsis thaliana columbia
gtaacggccgccagtgagatatctcagcaatatttttgttgatgtcgtcatctttcgaatacctgaagtcgattcgctgccgtgtttatcagctaagcgaaaaagcgtaagaaatggtagtttaggttgcagcagtaaatcatccggtgtatatattggctccaaaagactcctaaagatctgcaaaatttcctctctttttttattaataacttgagaatcatataccttagaattggaaccaaagacaaaaaccacattaagtagacacagacctcccagagtcttttcacatcataattcacatcactttaaacagttgcagctattgactctaaagtgtcagcaagaatctttggtgctttcactaatccaccatacggaactggatcatcttctttcctcatcggctctgcgaaatttttaacctaatattaaatcactcacatcattcaatgactcgagacagtgacactctgtgtctaatga

SEQ ID NO: 50183 - DNA, 923 bp, Arabidopsis thaliana columbia
gggacccggttttcttctcgaccggagttttttcctccgggaacaaaacaccgtcaatcccttgaaccgaaatccgtccatcggtataaatatcaggatcgaacaaataagccgaaccatcaccatgaccgaacttaaccgaaccatctgcctcctgagcctctactttatgaggaaaccggagtgaatcgtaccggattttcccaaaccggcgtacagaattgtacatactctcttcggtttggtattccggtatgatgtgataatacataatttgctctggagctcccggttcgctcaattggtccgtggtcaatttagccatagcttcgtcgtttggtgctaaaacggttaaaacgtaaccttccgacacgagccgacccatctcggtggctaaagaagtgagattaacgagaatatctgccatttcattgtagccaccgtaatgaagaagcgtgtggataaaatctttaacttgagcctctccgttgaaatggtggcgtggcccacccggtcctggtgccggagccggagctagtgacggaccaggtgacattgcgtcgtaaaccggaagaaccggtggagctccggcgggaattggtgctggctttttcttgagacggtgagttcttggatcaacctccggtgctccttccggtaatacggcagcgattgaacggagactacgacggcggttgacatcttcttgaacagaacgtgggattaaaagacgttcgattccgtggatgattccatcgggacgagttaaatcatcgggtttggttatttcagcggagttgacttttccgttggtgaaatggaggtggtcgttggagagagtacggtggctaacgacggcggaggagaattgtggagaagtgatcttttgggaagaatgtgaacattaatacagattgtaatga

SEQ ID NO: 50184 - DNA, 539 bp, Arabidopsis thaliana columbia
tcctcttcttagtcttgatctcaaggcatgcttcataaagtttcgatttttcattctttaaccggtgtgcctcatcagcaatcactatctcccaattaatcccggacaaaacggggccttggattcgaaacgtatcaaagctggttacaagtacctcaacaccgcgtgccttgagtttctccagaatcatatctctgtttgatccgtggtacaccgaaaccttgaagaagcttgcccatcgagaaaactcactctcccagttgtgaataatcgaagatggacagattattagtacaggacccttatcagactctaaaagacatgactcaccagcgtcaccgtcttttccatacactgcagcaagaaatgcaattgtctgaatggtcttgcctaaccccctgagtcaatacttattatcagagttccattatcacccaaacataaactattacagctacagattcaaatgcacaagaacattctcatgtaagaagactcacatgtcatggccaagaatgccccatggttgttttatagag

SEQ ID NO: 50185 - DNA, 516 bp, Arabidopsis thaliana
ggatcctgctcacaaatatcaaaccaatctcacaatgtcaatttaacttcaaaaactctggatattggtaattcacaaatagtcgctcttacattcaatattttgctgaagtccataccaccaggcataccgccaccaccaggcataccaccgcctgcacctggcataccgccaccacccattccagcaggcataccaccgcccattccgggcataccaccgcccattcctgcaggcataccaccgcccattcctcctgggaatccaccgggcataccgcccataccacccattcctcccgggaatccgccgggcatgcctcccattcctcctgggaatccaccgggcatacctcctgggaaaccaccgggcatacctcctgggaaaccgcctcctgatggtctgctagatgatgactgttcttctttcttagctttatcataggcagcctacagaaaaagagatatggataagccaacattatataaacaaaacccatgtctatagctaagtgat

SEQ ID NO: 50186 - DNA, 591 bp, Arabidopsis thaliana columbia
atgatctcgattacaccgagattctcgcacgttaatgacagaatcgaagccatccagtggttaatttagagtttttgtatcaagttttggaatttgatctagggaaaatacattttcttactaccaaccatattcttcttatctatcatagttttttttttttttttgtgttgtatgttaacttgaaagtagatcagctattcagctgtgcgatatcactgagacatagtatgttgtattgttcatgtgatgcgtgtacaacacatagagtgaaatcgatttggatgattaacaatgacaatgttgtcatgagaaagaaattatggtctccttctcagagtttataatcaataataattattattttgtggaaggccaaatacattttggcggatattcgataaaataaaaaaaactttagcatcgacatatatgacattctccagatacaacaagatcacatgggcaagtgcaaatcagcgcatgggtgcttttgcggatcataacatgtggagaagtcttttatggagaaatgcaaatcaacatattgttttcttcaacttcctataccatgtagttatgagaaagaga

SEQ ID NO: 50187 - DNA, 446 bp, Arabidopsis thaliana columbia
tgtttaatttggcccgcatctcaagatagtactatccaactctctctttagtatccaagagattccgctctatccttacttcaacggagctttaccagacccaaactctcttaggccgcaccgagagttgtttgtacgtgtgcataacgcagattacatatgacgcttctaaccctacaattaatttggttcactcattgccgcaaaccaaatagctcagaaaagattttaatcccaatttcatatcctaaatctgcatcatggtcggatagtgtagtggctgtaggtcctaatatctacgctatagagggattcagtaataatagaactagaccttcgtctagcgtcatggtcatggattgtcgtaacacacatggtgtgatgcccctagcgtgcaggtctccgtgtgaccaagctacttgcgtccgagatgggaaaatatatgt

SEQ ID NO: 50188 - DNA, 562 bp, Arabidopsis thaliana columbia
aagcccaagacgtcatggagacgtaatcgtgatcattagaagacaccgaagatgacgctggaggagttcacgcacagatcttggcgatcaggacagacatctgaagtcatatcacgaagtaatctcatcttaaaagaaagatgagtggaaaataagtgatgtcgataaccaccgttcattagtctgacaaagctcacgtgagaaaaggaagagttggatggtcagatacgagtagcgttgtcggatcgtgaaagctctgaggtgtgcaacagtcgaagtacgagttgcaacaagaaggtgctttgtgtgatccgagccaaggcacgtggtgaagtacctccagttgcggaaatatcatcatcatgaatgaggacccatgcaacagggacgtatccaagtgatgacaagccacggagagaagatcatcaaagaggtgtttctagtgtcagatgtctcatcaattatcgctcaaggaagaagtatctcggatattaggatccagcataagagtttttccattgagatggagaaaacgcaaatgatttacttgcaagggaagaag

SEQ ID NO: 50189 - DNA, 592 bp, Arabidopsis thaliana columbia
gccagtgtgctctaaagctgttattagcattagcaatcccggtgattctcgcgcaaatcgcccaaactgcgatgggttttgtcgataccgtgatggcgggcggctatagtgccaccgacatggcggcggtcgctatcggtacttctatctggcttccggcgatcctctttggtcacggactgctgctggcattaacgccggttatcgcgcaattaaatggttccggtcgacgtgagcgcattgcgatctaggtgcgacaaggtttctggctggcaggttttgtttccgttctcattatgctggtgctgtggaatgcaggttacattatccgctccatggaaaacatcgatccggctctggcggacaaagccgtgggttatctgcgtgcgttgttgtggggcgcgccgggatatctgttcttccaggttgcccgtaaccagtgtgaaggtctggcaaaaaccaagccgggtatggtaatgggctttatcggcctgctggtgaacatcccggtgaactatatctttatttatggtcatttcggtatgcatgagctcggtggcgttggttgtggcgtgctactgcggcggtgtat

SEQ ID NO: 50190 - DNA, 212 bp, Arabidopsis thaliana columbia
tgtggtattgcaggagggagttctccggcaacgcttccgtttacctctagccgcatttgttagtctaaccattacttacaaaattgacaaagtctcagagcggtttctcaacctggctggcccagctctggagtgcttggctgcaggctagcccttggccttgcatgcacatctgtagcttcactatggacccagaaggcgacacgttgagt

SEQ ID NO: 50191 - DNA, 810 bp, Arabidopsis thaliana columbia
ctacggaggattcaacaaaatggatgttagagagtgtagagatcgattcaatgggtgaaagctcctcaaaagaacccgaaattaacctcaacaagaacgaaggtggtctgaagaagaacgcgtcaagaaatctcggcgtgggatcgataatccgaacattgagcgtttcaaactggagaaagagcgggaatctaggctctccgagcacaaggaaaagtggaaacctggggcctccgaccaatgccgtgcccaagaagacaggtccacaaagagtggagaggacaacatcaagcgcggctaggggacttcagagcttacggttccttgatcggacagtcaccggacgagaacgagatgcatggagatcgattgagaaccggttcaatcagttctctgttgatggcaagttgcctaaagagaaattcggcgtctgcattggtaactaacaaaaatactaatatttattacgtacggttccgaagattatcctttagatccacttccatttggtattcgtagtgattttgatctagaacgaaaacttaaatatttcgtttttttttgtatacaataattctttttatattgtatgtttattatcagagatgcatgtgaagcctaaaaaataattcaggacgaaaagaaaattcattgtttgtttaggacgaaaatttaacatggatggtatatataactaggaatgggagacacaatggagtttgcggcagaagtttatgaagcattgggtcggaggagacaaatagagacagaaaacggtattgacaaagaacaactcaagctgttttggga

SEQ ID NO: 50192 - DNA, 577 bp, Arabidopsis thaliana columbia
gttcccaagaaagcttccattcattccagcatcaccattttctgtagcatatacatctatcttttaaggatgaaaagtacatgaatcggtcttatgtgtcgagcttaaggatctaaccgtaaagcgaaggtgcgatcctcccgtaacgagaagctaacacagagagagacgcaggctgtggcttccttcgtcgctcattatgaccagcgagtctcctgcggcaactccttttctctaggtcaaattccggaagctgatgaaacctatgtgattgattcagattgagttaacttcaaagaaaagcaacataacagaacattccaaagacaagacctctccacgttaactaccgtttgtatacattctatcagtcattataagcttttgtcatcagttttgaattaaaatctaaaaccacacacttgtaatataatgtaacagagttcctcaatgatcacgtcaatgatgctatggtacactagttttgtcccctcaataatgatatgcctaaagaacaaaaatgagggaacggctttcttcttgccattcatttcatatcctttggattagatattta

SEQ ID NO: 50193 - DNA, 570 bp, Arabidopsis thaliana columbia
gaaatgggtttgacaaagtagggcttttaccgcatacttcttaagcacgttacccactcttcctcttccaattgactcggaactcaccacaccttcttcaaaatctttgtcttcttgccttaaaaccaataatggtttgctttgaggttatttcgctttaatttaatctcgacttgtcattgttaaaacttaaaagacgagtagaccatatacttttctcaaggagttttagcagatttttttttaaaacgaagaaaaatagtattttagagtaattattacggttatatataatcaaaaagtccaatgtcaactcttttgtcacatacagggaatatttttcgtggacttagaacgtagaaaattgcgtttgaagccgttcccttataaccagaacttgtttgattttcgaaactcagaacctaaacaaaacttgtctttgtgttctttttaccattaccaatggctcaaagattgcatctccttcttcttctcttcttgatttgctttgttaatcttatttctttttcaagtcaacaagacttaagtttcatctacaatgggtttacc

SEQ ID NO: 50194 - DNA, 668 bp, Arabidopsis thaliana columbia
taatttaacaccgttacagtcgaacagtattttagattctagcataaaattcattagatactgtatgaattgaccaattatagtagcacatacatgaatttgtacggtagtataattcatgtctgaattgtaagagcagaacataatattgtatgaatgaaccgttttctctcaaatccaattgtaacataggacaatccctacatgttatggacctatatagtactaaatgaagatatgatgctgtatctaggaaataatagaacaagggggatgagattgcaaaaaacatgtctccgtgatttagattccaccatgggattcaaaacgaagaagctttgacagctcatctgatgtgtgatgtgaaggacacaacgttagccagcagcaacattccccaaatcgaaaaagtcttttactcctcccagcaatagtggcgcagtccggcgagatttgtgattcatgtcttctacttatagcccggtcaaagccccggaagctcccggttgccgcagctaggcgctgcggctctgcctcgcgtcttagatcttcttcctccaagaagccgcctgagccatttcgtcgagccgttgcggactgactcacagcctctcctcctcgggttaattcggaccatggcgcgcatccgtccatggctgcctctgaag

SEQ ID NO: 50195 - DNA, 597 bp, Arabidopsis thaliana columbia
tttgatgtctggggctttgattatatgggaccttctccttcctctaatgggtatacacatattttagttgttgttgattacgttactaagtttgtagaagctattccaactagtagtgctgatcagaacacctctattaagatgcttaaagaagttatttttccaaggtttggagtcactagatatttaatgactgatggtggttcacattttattcatggtgctttccgtaaaatgcttgctaagtatgatgttaaccatagaaatgcatctccttgtcatcctcagtctagtggtcaagtagaattgagcaatagagagattaaatagattttgcaaaagactgttaatagatctagaaagaattggtctaagaaactttatgatgcattgtgggcttatagaactgcttataagaaccctatgggtatgtctccatataaaatggtttatggaaaagcatgtcacttacctctcgaattagaacaaaaagcttattggacaatcaaagagctcaactatgatttcaaatttgccggtgagaagaggttatttgacattatttcacttgatgaatggagacccaagcctatgtga

SEQ ID NO: 50196 - DNA, 556 bp, Arabidopsis thaliana columbia
cattgtaaagttaagaattttatcttattttatctcattgttttgtcctttcattatttatccagatttcgcagtctctctgttgtgggatggtgaaaacacccctgttgaggttgatcaggtagataatttgataaacaacattgaagcttctgtgagaactgctgacccaagatatcatcttgctcaaaggaaggttctagtgggacatgaaaatctcgactttatcaaggagaatgaaaagtctctacaggtacaaggtttccgcttgatcaaaccaccctatcgagagcgtaaatgcgtcatatgtgatggttcagttcaaacatcacgtcacaaacgctacccttacgagcggccttatgacgtagctgacagactaatactacaagaattacttgtgcaaaagttgctatgtttttaacgaggaagacaaacagataaagagtttagagatcttatcagctttgccaaatattgttctacatgaagtttttaatttaatactctgtcacgttcattctaatttaataaagagttttgtagtaaactttga

SEQ ID NO: 50197 - DNA, 552 bp, Arabidopsis thaliana columbia
tttcggtctaacagaggggatgattgcgcttcttgaaagtcgtcgtagtcaagatggtgcttacattgggtgcatgaaatctggagatgtgattactgaagagttcgtatattctcaactatcttcagttcacataattgagatttcctagctgtgacaattgcccaaaagtctcataattaacattctcattctcatattaaatgggttgtttcttggtattcaggggaagtcaatggtatgagcctgagtggtggaaatttggggacgacaaatcgtaagtgtcttatacctcataggtcttctcgtttatgtcaagcccttgtgaccttcgttgtgtgtactcagtttctttgttcgatttatttaggtatttccgtcatgcaactggttcgctggtaatactctcaaagaatctggctcagtatgtcaatataaacaggttaggttcacaatttggcagaagatgagtatatatgtcaaacaaagcttggtttgtaatcattgtatatttctaccatggtgtgtatatataataaatgcagtggattg

SEQ ID NO: 50198 - DNA, 1611 bp, Arabidopsis thaliana columbia
tgatggaacgattgttttttttaaactaaatttttgtgagattttaaataaaaataatcttaattagttcaaaattaaggtcgaaaaaatttcgtgtagtatttcaaatgtgctatatgaatgatgtagcttgtaaaatccacagatcagttggatgcattctaccgatccattcgatcaattctaaaatccaacttaaagggtctccaaagaagaatctaaaaatacaggggtataagtcaacaaacaaaaatataaggataggacagtaattaaacacgtcacctgcccacaaagaatcaatactagccaatcacaactctccactacgatctctcatcacgactctctctgtgctatgtttgtgacataaagtctcaaaaacaaaattcgtttcaccaaaaaatgaaacaaaaataaaaatatttctgagaacctcaagtttaattttgcggcttagatttaaattcgtctctcaaactcaaatatctgaaaaaacctttctccaatatataaataagttacacgagactttcaatttctctgtatattttccttttgattcccagaaaatgtcactagattccactttctagcttgcgttttctcgggaatctgaagtttccttttgtgttgaatcgctgggaaaaatctgatggaagcagcttcaagttttttgtgtagaagtattcggattccgtcgactactacggcgacggcggcgttcacgttcactcgaccgccgttaaactacgtttgtgttgtcggagttcgtgttttcccgacgcggaaggtcttttgcagcggcgttaatggcggctccagtgttactaagaagaagccacgaaggaaaagtaacgtttccgataaacttaggtttaagaaaattgagaagaggaacgataatactgaatctgagagtttaagtgttgttgaggaaccgaagaacgataaagaattgagtcttcgagctttgaatcaaaatggtgatccattagggcggagagatttagggaggaacgtagtgaagtggattagtcaggcgatgaaagcgatggcttcggattttgcaactgcggaggttcagggggagttttcggagttgaggcagaacgtcggatctggtttgacgtttgtgattcaagctcaaccgtatctcaatgctattcccatgccattaggttctgaagtcatttgtttgaaggcttgtactcattatcctaccttgttcgatcatttccagagagagttgcgtgatgttcttcaagacctggagcggaagaatataatggagagttggaaggagtctgagtcttggaagctgctcaaggagattgcaaattcaggtttgaattcttcgagtctaagttcttattggtttatagtttggctgaagttgaactttttgccttgtgtgatgttgtatagctcagcatcgggaggttgctcgcaaagctgctcaagctaagcctgttcaaggagttttggggatggactcagagaaggtgaaggctatacaggaaaggattgatgagttcaccagccagatgtcgcagttacttcaagtggacgagatacagaactggaagtaccacagaagactagatgttg

SEQ ID NO: 50199 - DNA, 471 bp, Arabidopsis thaliana columbia
gatttcggtgcatttatacgaagggtattattttccccgatctaacaatctgaattaaatttttggccatgttgtgactatcaaaccttatggattatttatcttctagcaccactgcaggaattgtggtgacgtcttctgtgacaagtgtactcaagggaggattgctctcaatggctgaggataatgctcctcaagtccgtgtttgtgaccggtgcatggtatgcttatctgtctgtgtatttttccttaagttgagaaatcatgttccgttgattcctgagaatgtagctttaagttaatttgaactggtatcttgtcttttatgcgtatgcctctaagttcaatctgtttcatggatgtgcaggcagaagtgtcacaaaggttgagtaatgccaaggaaaccactggcaggaatgtgagcctgcagagctatgaagaccttgctagaaagttacaggtgagctaatc

SEQ ID NO: 50200 - DNA, 347 bp, Arabidopsis thaliana columbia
tgagttcagagtatccaaagctcacgcctggagggatcatatcttcaacaaacctccatgaatcagagttaaaatcgtagatatcaaaatattcgctacgttgatgagagctcaagattttgtagctcttattgcagcaattgttgtctacttggcagtatccgaggtcaaagctgcgagcttctatgagaaaattgccggttctgatccacctggttcaccagttaaagggttccaaaccaagactctagatgcgtcgaaatgggaggtgcatacacaagcggcacagtgaaaactcgtgatatttcgaatggagcagctgaattcttagaatgaggatcgattag

SEQ ID NO: 50201 - DNA, 521 bp, Arabidopsis thaliana columbia
caactggaggagacaggacaagattgtataaaactgtcgaggaatcaaagatttatgctgtgatttctccacagatgggtaaacaggtacttaccagtgtgtcatacaagctagaaattatgtctgtaaactctcatccttgtgacccataatatcttttctttgtccactaggttgttgcgtttcttgcagcaatggagatcatgtctgagcagtttcctggtgcatttgctggttattccttagaggtacgtcttttactttgagatattcatttaagtgcttgtatcatattacggctaattggctgtaatctctataggtgatggagtctcatcaagctagcaaattggatgcatctggtactgcaaaagctgttatttcttgccttcagaaattaggcgtgtcttacgacatggaccaggtgtttatatcgtactttgttctgtagatctatcgttctctagtaagatcatcatctgtaagaccgtttttgcgtaattttgaaatcagatacaatt

SEQ ID NO: 50202 - DNA, 530 bp, Arabidopsis thaliana columbia
gacctacaaggttaattccacttgggcgtcgaagttgaatttgaacgtggaataaaccaactgttttgatccagttttaaaatagagtcgtgtgtgaccccaaccgatatatactgttttattttgtatcttctattatactacatacttccactatagtagaagtctagaagataaagttaatttcgtggtaccacaccatatatataaaagacctagaatttgacgttatcttcgtgtaggaagatgcctcgcaaactactgtataatgtttaagaattcacataaaattaagtagttgctaagagggctgataaaaccaaaaaaaataaatatatattggtggaaatctccaagaaataaactgtgggctgccagaaatttattcccaatttacaataataatagtataataagctacaaaaaaaataggatagcattcgcaagtcgcctgctctttttcctcggattcagtgaatcatccaagtcgcctggacggtgttggttcacatatccatttaacatcacat

SEQ ID NO: 50203 - DNA, 586 bp, Arabidopsis thaliana
taagaacaaaaacaaactcaatttaattataaagaaaacaatcctcaaacttcatacctgaacagagattctcttctcattgtaaacagcttcaccaggaaccaaattcttagtgacaagagcatcttctttacccttagcaataaacactcccgcatgtctgtgaggctcaacaatcactttgcttcctcctttcattcctccacgaggtggtcctccacgaccacgaggcgcaccacgtcctctgccgcgacgccactacggcctctgtcaccactacggcctcctccaaagcttcttccacctccaaaaccgtcttccaccaccatctcttccacctctgaatcctccaccaccacgtcctcctgattataacaataccaacatacagaaaattaactaaacggaagaacagagtgttattaaaaatctctacttttatctttgaactttattgaaacagtgaagatacaaaaggctcatgaattaaaaccctaactaccaattcaaactacagaaaccgtaatgatacgaattcagatttgatacgtgcagggttatactctagaggcagacagaacaagaa

SEQ ID NO: 50204 - DNA, 555 bp, Arabidopsis thaliana columbia
ctagtaacggccgatcttgctgcggatctgagcaaattcacaacaaagacaagtgaatttttaagacttacaatttgagagaaatcaaacaaggaagattaagaatcattgacaaaaggaaccatctgagctcaacagaaataacacatcaaagattgcaaaagtaggattcagtaataagagaaagagatcaagttctgtagtcacgcctaactacaagtattgcaggggaatgtgtgcgtacctgacggatttggctggattgagcgtacaagtcctcttgacctggttagcacgtctcttggtgaaggcgatacagaatagcctgagagtgtaactgtcggtggttttaacatcaacatgagcctcaatcaaagtctgccacttcttaaccaacgacctaagtttataggtggtgaagtccatgccctaaagatgattaaaaaaaacagtcaagctccacaaccataatctgtgtttttaaccaatgaccagaattactgatgtaaatcaatgtttacacaaactatccttacccgagattggcacagaacg

SEQ ID NO: 50205 - DNA, 1181 bp, Arabidopsis thaliana
aaacaacaacaataagattcacacaagctgatgcttacaatccagatgttatcaacaccaccaagaatagcagcagccaacttcgaacggaaaggattccaaactctgtattcagtcttggttccatcttcgttctgcagattcaatcacaagaaccattaaaaacaaattcatcaaaaggagtgcaaatacaaaccatcaatcaattaatcaatcctctataatacctgaacagagattctcttctcgttgtagacagcttcaccaggaaccaaattcttggtaacaagggcatcttctttaccctttgcaatgaacactcctgcgtgtctgtgaggttccacaatcactttgcttcctcctttcatgcctccacggccagctggtcctctgccgccgcgagcaccaccacgtggtggtcctcttcctctgccggaccaccacggtcgctgaaacctcttcctcctcctctaccaccgccacctcgaccaccactgaatccaccgtcacctctaccaccactgtatccaccacgccctcttccaccactgaacccaccaccacttcctgaacacaaaagaccattcattagagactccatgtttaacataaaacccaaccatcaactctatatccgatacaactaacgcagacccaatacagttctaagcaaaaaagaacaaagttgacaatcagttcagctaaagacataaagttttaaagactaaacgagctaagagtgtcactcgccattgttaatctgataagcaagcaatgaagaaaagagaagaggcggctagggttcttaccagttagaggaggtctcatctttgcgttaagactctaaagaatgcgaaaatcaaggagaaaagcttttgatgagagagagaatggcgatggcgatgaacgtgcgctcgcaagtgtttttatacatgtgtttcaagctagggttttaacagggttttaatttaactcgccttatttattattatttacgttttaatccttatattatgtatacatatctttttctgctgtcaactatttagaattaacattttgcccctcgtagttaaagctttatgaaattctatcatcacacacactaacgtgttacagcaacaacaaaattgtgtgtaaatatattaatcgtcttaccattgtaaattgtaatacacaac

SEQ ID NO: 50206 - DNA, 331 bp, Arabidopsis thaliana columbia
tattaattcattattgatttacatattaaaattttgaaattttagcacaaattacataacatattattctttaaaagttttccaaataaacaatattaaagaatactaattctgatattcttcgtatataatatcatgactactttctattaacaatgtatagtcaaatcatatagcgttatgaactcttaatatgatgacttacgtacttttctaatcatagagagtatattaatatagtattatcaggcactagcattagtcagtggctactgagtaaagcattgggcgaccgagagaaaccatttgctgagagcacactttcgttgac

SEQ ID NO: 50207 - DNA, 678 bp, Arabidopsis thaliana columbia
tcaaaaaccgttaagtagttgttgcaacttgcaaggatcacctaaacaaattataccgaaacttgcacaattgaattccaatattttaaaaacatttttcttttgtcatttgaagcatataaaatggttctgaattctgatataggtgggtggaacagagtcttcccccatatagcaaatccctcaacggctctagaaatacgttttaagcttcacgaggaataagaagattaggaatatatgggcttaaagcaggcctgaactaaattaaaggcccaactaaaagagaggaaacaaatctcgatttgctttctctggtgagcgtgtcttcttccgatcgtcttctccggctgcgtgaattctccgccgagccatctctctggcgaatctccagtgagttctattattttcactctgtcttttatgcttcccgtgaaagggatttttttatttctctccctcagattctccttgtcgccaccaactcattcgtctccctacccatttgtggccactggattttttgtattgacctttctttttcctcatgaatcaattgaaatctactgttaagcatttgacgattttggacaaattggtggtgatttaggaatacacggttgtggtggtgcgggacttcacagtgcgatgacagatagttctagtgatgcagatagt

SEQ ID NO: 50208 - DNA, 912 bp, Arabidopsis thaliana
cgatccggttttgagtataggtaccgaagaacttgtctcgatatgcactctcctctcatgtaacttttctcggaataaggctttaatatcctcatgcccttgttgctcagcaagatccctcggcgtccaaccatgcatatcctgcttgttaacatccgcaccttgctccagaagatactttaccatctcaatgttctcttcgcatacagcggtatggagcgcagaggtgcctgtggctctaggacgagtaacgtctccaccatgaagaacaatttcttttagtagtttcaagtttccttgctcagccgccgtgcaagcaaaatgacccacatcccctgcgtctatggtactgccatgttctaacagtacctttacaactttctcatgcccttccaccattgcttcccacagtggtacactcccttccgcgtctgcgtttacatttcgaagaaaccaagaagctcaatacttcagaagaaatcctgaaatcaaaagggaagtaccagaactgaacaagcaagtacctctgcaattggggtctgcgtggtactccaacagaagaagaacacaatttagagttccttttgatgctgctatatgctgtttccagaaaaaaaaaagagatcataagttatagtctccaagagcttggatgagaagaaaataacagaacaagaatgtgaacttgactgaccagaggtgttctgccattgttatccgattcatttggatcaagtcctctctttagtaactgatgtaaaagtaaatcgtcttctcttattgcagcaaagcataaattgagaggaagatcattttacccgtgcaagcatgttttctatctcagcagaacattcgtcatcactggatcattcatttctttcaaatgctgctctccacaaagaaagagagtga

SEQ ID NO: 50209 - DNA, 716 bp, Arabidopsis thaliana
atccgaagagaacaaaaatcagcacagaaacactaaaaacaaaaaaaactttaaacttgttccaataatataacctgctgttgactaattgtctgtatcgaagcctttgtcgaccaagaccaacggcaccagatgacaccaaaatgacctcaaatccatctgagtttaactccgcaagctgatattatattacacaagtccttcaaaaaccattttttcgattctgtttttaaagcaagaacatatattgagtatatcaaaatacctgttcacagatagctcctaaacgtccaagagccaatcttccacctttcccagtaacaactgcagtcccaacctgtaaacaataacaaaaaatcgatcaaatagagataagggtagtgagaaaaatcgaaaatttaggattgaaagaaacaaaattgtcattgtttttcaacattactccagatttctccgccgccaaaaaacaaatgttaaaaaacttaagaaagcaatcattgaaaaagtacggattaatacaaataccaattgacatcaaccaacaacacagacgaagctccgatgagaataaagtcaaacccaggaatgtttttgaagacaatcatcaatcaacaaaaaaaattcacagagaatttcaaaccttgacgacgatacgcttaacgtctttggcgaacgcgcgtgaacgatcgatctccgtcatagtttgtgtctatcga

SEQ ID NO: 50210 - DNA, 571 bp, Arabidopsis thaliana columbia
ccttactgtcatcatcatttagtctgttgttatctgtttccttcttactgtcatcatcaggaagctcagtacctgatttttcctgctctagcttctgctcccgtaaatccgcgtgtttcttcttaagcttctgcttctgtgaagccaatctttccttctctatcttctccttcagtaaatcgagagtcgtcaaagcagacttctctgggtccaacttatctctcttcgccttctttaggttgtcatttgtttttttcttggctctagctttttgagccttgctaagacctggataccatttcctttctgtctcatcaggtaagtagaatctagcaggcgtgagtctacccacttatcgaaaaattcagtatgctgatgagtcttgaaatccatttcagaaacatgtttaccctttttctttgtcatctacaacaataaccaaaaccaatcacaatcagaaaaaagcccttttggagaaatgacaaataataaactaaggactcatagtccaagtttcataaaaactatagaatcaagacttacaatggcagattaacaaaatattagatga

SEQ ID NO: 50211 - DNA, 590 bp, Arabidopsis thaliana columbia
ggcctttgttttttttgactaaagacaatggatatctctaagatggctgctggagatgcttccttcacagctccgtttaagctcgtcgcacaacgaaatgaccatatccatgcccttgtagcctacttcgatgtgtcattcactatgtgtcacaagaagatgggtttctcaacaggttcgacttccctaaacatgagtgaaatatgttgatgtttgtcaatgtttggtactcacattacaagtcacaacatgcaatgcaggaccgaaatcgcgggctacgcattggaaacaaactgtgctgtacctggaagatgtgttaaccatatgcgagggtgaaacaatcacaggaagcatgaccattgcacaaaacaaaaagaatcccagagacgtcgacataaagctcagctattctttgaacggccaacattgcaatatctcaaggacccacttctataagatgcgctaaaagctctcagaggatgtaaaatccccacaagtacctttcatcatcttgaggctgagatggacaaatctgatttgtatctctactgtttccattattgctgcttatgtttcagaattagatatta

SEQ ID NO: 50212 - DNA, 518 bp, Arabidopsis thaliana columbia
gaattcatattctgctccgaaatgcacaggaagagaaaaatctcagaacaagaagatctgataattagaacaagccaaatgctaaagactaactaaaactattctaaagttttagagtttccactaaacgaagcaaagatgataggaactcactcactggatttgccgtcaccgtcgcacaatcagcctctgtttaccgattaacagtcaaacttgaagaccaccaagctgcacgtcactgtttctacgccacgatgccgttttgcgagaccaatcttattaaatgggcctatttggcccaagttctccaatatattcccaatagtaaatcacaaagtgtccatttttttatacagattcggttaatacgacttttttttcaacgttgagatacataattcggtgtttatattcaggcacagatacccattatctacatataggctatagcttgacatgagatattaagaactacataaatcattatgctggtcgagttaatgagcatcctatatttt

SEQ ID NO: 50213 - DNA, 592 bp, Arabidopsis thaliana
tctaatgacataaaactcgctcttcagcagtttgaagcgagtgttaaggaccacattgcgtcgagaaacgcgttgattgcaggatttgtgaagaatggaatggttgagcaggcaagagaagtatttgatcagactcatgataaagacatcttttcatggaacgctatgatatcgggttacgcgcaaagtctatcgcctcagttagctctacatctattccgcgaaatgatcagtagtagccaagtaaaaccagatgcaatcacaatggttagtgttttttctgcaatttcttctctaggatcgttggaagaagggaagagagcacatgattatctaaactttagcacgattcctcccaacgacaatctaaccgctgctataatcgacatgtacgccaaatgtggaagcatcgaaactgctctaaacattttccaccaaacaaagaacatttcttcttctacaatctctccctggaacgccatcatttgcggctcagcgacacatggccatgcaaaactagcgcttgatctctactccgatctccaatctctccccatcaaaccgaacagcatcacttttgtcggtgtcttga

SEQ ID NO: 50214 - DNA, 356 bp, Arabidopsis thaliana columbia
gaatgatatagtaactgcttagtctcagaattggtatctgtgtggtttgttcttcaggcatatgttgtctgaagggatgggttatgttagaaggattagtgtaatgactgattactctcaaatttgattcagggctgctgagattccaatgggaaagagcggtgtgcgacttcagatgaaattggtgtgcagcaatttggctccattcttcatattcctgctacaatggatggatttctcatgtctgcttccaagatattttgatttcttccacatactcatatacaaggttgttaccgcatacatagatatcgagttgtgtgtgtgtgtgtgtgaaatggtagattccctgatag

SEQ ID NO: 50215 - DNA, 461 bp, Arabidopsis thaliana columbia
taactaatatacttgtttaataaaatgatccttttatgttcttgaatttgtaacctgagattccgatgtcatagccaaaaatgagaccacatgaggcagccacaatgcaactcatgacaactgcggctgtgatcttggcatcaatgtttccggcgctggagacatcaagagccaatcctccaccggccattttgcttatgtcttacgcatgaagtgttttttttttgtttttttttggttgtaaaaccaaatgaacaaagagaatacattaaagataaagaaggtttttaggtgagtcttttagttagttggcgtggtgacttgatggtactagtgtgcagccacttatctatgcatatgtcggttaataacgtcataatctaaaaggacttaagaaactttcaaagcaagaaatgagtttttgatttttgtgtcacataaaaccagtcgctaaacttact

SEQ ID NO: 50216 - DNA, 519 bp, Arabidopsis thaliana columbia
tccctgagatcttctgtgtctagaatgcattgtaccactatcttcccctcttttgatactaattgcttcatgttctgcaagtctagcttcttgtggtggggtactgacttcacgttggtcatcagtagcactgtctttcaatgactctgtttcataatcatcagattcctcatttataccaacaggaagaagaagaggtagggctcaaacgaaatgcgatctccaagagatgattccctctccactgaggatggatccgtctcatcagaattgcaaacactctcttctttctccttctcaagcatttccttatcactaggtgttgcttccctactgcagcaattctctgttggaagagatttctcgccactgaaacttccagcgttttcttcatgacaccccacaaaagcgtcatcttttggagaaccatagactgaattcaaatccttgctaccatatgaatgagaaacgtcacttctagatgcttcatttgatgttatgcatcttgctttctcaggt

SEQ ID NO: 50217 - DNA, 477 bp, Arabidopsis thaliana columbia
cagttttacagtttattaacttgcaatcttcttttttttattaaatgaatttatatatgagcaactaaaaatgctcattaagagatatcatcatgaaagtctttgcaagccatgattctagttccaattacaaacctgaacgttacatagctaaattattggagacgaagcgaatttagcgaaaatgctctgacatttttaaatggagctaaataatttcggttatacggataatcagaaactgcattttaggaattaagaaatgtgtcagcaaaattttgaaaacaataatagaggaccttaatgataaaattaaaacaaaaggggcaaatacgaaataatataatacagaaggggtcatttcaattaggtggggagcttcgagttcaagagatctccaaaatcgtcgacaacttcagacgtactccaacaacaaagtacaacaacaacatcaatcgagagaaagcgaataaataa

SEQ ID NO: 50218 - DNA, 541 bp, Arabidopsis thaliana columbia
tgaaatctcttaatctcttcgataattactagatttaagaaatcaaaacatctacttacaaccccaacttgatgaggcttcgatgatgaagctttggaatcatcaaatacatgttgacaccggtaaattcgagattcatttgatggaagaccgatatgccgtcgtagtctttgctggttatagcccatacgtgtacgtcctcgagagcttctctgatctccttcgccgttaataatttccacacgatcgcttcttcttcgtctactctctcttctcgcttgacaactgtatcatcgtccatggcttctggtgacgaaggagctgttttcaatttgtctgattctagccttcttaagattcttaaaggagacatcatcaagtggtctgttgattcttcctccgatgctattgtaaagtctctctctgtctcaatcaattcaaaattctagggctggttttccacaattgatatatgtctcaaattagatggaaacttgagcgttggtgatgaaaatggtttgataggatcttgaattgtata

SEQ ID NO: 50219 - DNA, 1472 bp, Arabidopsis thaliana
  unsure (1)..(1472): unsure at all n locations
caatctgatttattaataatgttgatatatattacacgtgttaattgcatgggcgtgaatatatctttagtaacgggtgggtaaactccatgacaataccaaaatttgaactctcgcgcttacgttataaactaagctataacttctaaccccccatgcatgtttcaattcaacacatttacaaattcttagatctaaatatggaaacctatttcctacttttatctctcgccttcttccttttcatttctgttaaacttttgtttggtaaacggcttagcaagtttaacctaccaccaagtccggctaggcccctgccgttgattggacaccttcacctcctgaaactcccgcttcaccgcacattcctctctttctctcaatccttaggtggcgccccaattttctgcctccgcctcggaaaccgtctcacggttgtagtctcttcatactccatcgctgaagaatgttttacaaaaaacgacattgttttcgccaataggccagagttaattctcgggaaacatattgagtacaactccaccactatgactagtgcgccttatggtgaccactggcgaaacttgcgccgcattgctaccctggagatcttcgcatcacataagctcaacggcttcttatctgtccgtaaggatgagatccgtcagttgctactacgtctctccaaaaactcgagacatgtttgtgagcttctacatatctttacattatctaaatatctataacctaaaccctaaccccggcaatgtgtatatgcacatggtaaattactccgaaaggagaaattttctttttatatacagtcttaataaatataagggtttcatgcaaaaaaaactcaaagtcgttcattttttcaattttagcctttacatccaaaaaatacaaaataatcatatgaaatccttttttgctattgttaaattttaaaattttggtattaatatatcaaatcgaagctttcgagatgaggagtttaactatatcttcagaatttttaaaaacaaatgtatgtgatcggaaaaacgtttacaatatatgtaaaattacaataatgagctatattgcgtattattttggatttcatctgattatttcgtatttttagacgtatagagtaaaattgtaaaaatagatgattttgaggttttttgttttgcacaaaacccaaaaaaaagattgagaagtatgaaaatgtaaatttgagaataattcattttttatgttattataaaatcaggggtttgcgaaggtggagatgagacatttgctttttgagttgactatcaataacgtttttagaatggtagccgggaaacgattttatggtgagggcacagagcaagacgaagttgcgcacatngtgagacatctgatggacgagattgtgccagcgctgccgcgggaatgcaccgactatttccaatcatgcgttggttccaaattttgag

SEQ ID NO: 50220 - DNA, 607 bp, Arabidopsis thaliana columbia
cctggtcctaaaggagtgttgtccacgaagtcaccacgatcagaagacatgacaattccctcagcaacaatgtcatcagtaccagaccaatcatgcagcacacatttaggttttgatctatctttcacactctacgaaattaatacaaaatcaaacaacattatatccatcaatactaagctactagaaggtcattgagcaaatacttactactagagaagagttttcaccaatttctggttcagttgttctctgtgaaaccaaacccaacaccacaaacaaaattatgcaaacttaaatgtttaatactaacttgacacatgaattagcaattattacctggttattcaatttagcaagtgcttcttgcaagtcctcaacttgtttctacaactggtattggtttttttgcatatcagccatatgcttgttcttgacttggaaacaagcaagtttactcatgctcatccctcaacccttagcccttagacgcccaggcttatcaggtcctaagacatgtgcaaggagatcgtcttttggattggttgatgttgatgaagtatcccagattcagcaagctcattagccttcttctgtaaacatgaaa

SEQ ID NO: 50221 - DNA, 571 bp, Arabidopsis thaliana columbia
cgcttaatatgaagatcatcacttatgtaaatttctttgtactccatataaactaaatgcagcaccatttgactcacagggaaagaaataaagactggagaactacctggtgcggcattactatgtctatcttataaccccagagatgtgaagtttgggtcatcaagagtaagtattttaactttctgctaggaggtatcctatacttttgcatactgactttcatattttttaatcgcagagctttcatgatgttcattttcaatacgaggaggcatttagagtagtagtcaaatctctccagctctcaagaaatatttcccttgctcttatttccttgcaatcactgaaagcttttatgcggcgttggatgagagcgaatatattgtccattgatgcaacgactaaagaattatcatcggataagacctctaaagctacaaacaacatcatgaaggtttgagatagtgtttttctgttgcaggttaattcgaatgtttcattttaagtgtcaaaccttaattgagaactgttgtgttgttcatgtagagtttggtacatatggctgaag

SEQ ID NO: 50222 - DNA, 600 bp, Arabidopsis thaliana
tatgttttccgctgagaagatcaagcagaagagtgccgaagctgtatattacactctcgggagtaattctccctgtatatacaataacaagcagaacgtgcaacttaatctcaaccatatgaatcttggagaacaaaccaatggtgtgccagttcgtagatattcaggaggggtgaaagcaagattagtgctgtaacttttgccatcccgactattcttcatcaagccaaaagtagatagtcttggattgcattccttattaaaagccccttaaggcgtcagagaatgaaggaatagcatagaaacatagacaggtttcgaagaaagaggaaaaactgcttatatataactaataaatacctcatcaaacaaaacccggtaagcattgacgtcgtggtaaagagtacggcctttgctggtgcagtattcaagagcttgtgctagatataaaacaactcgtagcctcatagtccatttcataggttgagtttcccctagtagcataaaaagtacacttagacaccataacttccaagactagcatggcaagattattagatgagaggctatatataggacaaatgattctcacagtgaaaa

SEQ ID NO: 50223 - DNA, 569 bp, Arabidopsis thaliana columbia
caaaaaaaaaaacagttaaccattatcaccattgcaatactgacacaacagcagaagctatacaaagaatctgtctttacactaacttaccatagacaagaccatcccttcaagtgcctcactatgaagaaacacatcacgaaaagtcattggctcaccgggaagaccaggatcaacgtaataaacctatacaatttctcaaattattagccaacatgattgaaccatcatgaccaaagacatgtggattggatttactcacggtactgaagtttttaggagaatcttcggattgagtatgatcatcggttttgtgattgttattgtcgaaacaagaataagacatcctctcaatctctctcaaagcaacaagccatctcctcaacaactgcactctctcgcttcctcttgaagaaaccgaaacctcttctaatctcttcaccgcgagactaaagctcttcacattcctcgatccctacattttaaacacacacatcggcgattagaatcgcaatcttagataagaagaggagagattataacgtacgatgcgatcctggatgagtttg

SEQ ID NO: 50224 - DNA, 545 bp, Arabidopsis thaliana columbia
ttctatttaccttgtcaaatgctcgaaaacattcacgggatccagtccccacaaatggaatgttgtgactttccaacagctcctacatagccaataatcaatgatatttaaggtctcgtaacataagtacttccaatagaaaataaaatttataaggacttgtccaaacaaaaaaacctgaatgcccccatcttcaccaaatcgaccatgaattactggaaaaacaatgtccacagcagaaacaagatgctcggccaattcggataatgacgagaatccctgtgcaagactacagtatgaaacaaactagccactcagctaatttggtcactgctattgtcccataaccaatttttcaaaccgttcatatcatacacctcacctctccagcttaaaatcgaaatctgaaggagtattcgagtacacctgaaatttttcacaaacaataaaagaaagaatgagtaagagatacataaagcagaattgttcaaaatgcctaatacaacgctgcaaacctgagcggatgaaattgcaaaggctttgag

SEQ ID NO: 50225 - DNA, 441 bp, Arabidopsis thaliana columbia
gatggaaatttctttaagagttacaacttttggaaagggttttatattcataatttaccttcattttggaaagggttttacattcataacttaccttccatgaaaatctcagatgagagtttgaccacaggtcttatttaatactcgtctgaacaaactcttgtccctagggacgaaagaggacgagatctctaagaaagagacatccatatgaattgtaagtcattttctttttttctaaatccaatacaaaaattattaacgattttatacgttacgttctgtgattaatctctctggtttcattctctattgatcgtagcatttatgtcgctcgttcgtactgcgacgatcggtcctcctccaatcgcggttctgcaaaacgctaacgctgtgaaaaatctgcaaagtattgttgcgtatcaaggtgcggttgcgaca

SEQ ID NO: 50226 - DNA, 426 bp, Arabidopsis thaliana columbia
tccggttcaatttgaatgtttgctagtttgtttgatttgcaacatggaaccctcatgtttggttagtccatgtttttaaattttaagatgttgtcttctgtctgtacgtggatgattccacttttgtaaccctcacaatctgaagttttaataaaaggcaacacttatgagaaaaaaaaaaaaataacaccgaaaatgttgcaaaaaggcgacagaccagaaggagttataatacataaaggttacatatttacaaccctactgagtaatgttagcttccattaaattaaaaacacgtaaatacaaattataaatttataagtaaactattttgcagttagaagcaaggatgccatgttggatccatcatacataagttgcgaggcgacaaggctgcctccaccaacgtcgtcactcctctttgca

SEQ ID NO: 50227 - DNA, 128 bp, Arabidopsis thaliana columbia
acatggccttcaaaacagccacgagcttctccttagggggcaagacttccttaataaagttatttcccacgaaatcttccgaccaacgttgaagttttggaaactcctccgcggtcatgatcgtgacg

SEQ ID NO: 50228 - DNA, 458 bp, Arabidopsis thaliana columbia
cacaactcaataaagtttacttgcgctgtaacataatcatcatgcggccgcgttacagtctgattctgtctgcaatgcggctaatacgaccgtccaaccgccgtctaagttcgatcgcaagctccgactctgagttcatttcatacatgaagaataaggctaagtccatcaacaaagcactagacaattcaattcctctttgcaacaatgttgttcctctttgggagccagtactcgaggttcacaaagctatgaggtacacgcttctcccaggcggaaaacgagtaaggccaatgctctgtttggtcgcttgcgagctcgtaggtggccaagagtcaaccgcaatgccagcagcctgtgcggttgagatgatcacgcagcgtcgctcatcctagacgaccttccttgtatggatgacgacagcctccgccgtggataaccaccaaccataaagtttt

SEQ ID NO: 50229 - DNA, 499 bp, Arabidopsis thaliana columbia
tagttggacgctcgagatgggcctagcgcctagcgaaataatcagagatttaacgggatttactcaggattagtttttcgagcaattttaatattttttaaatatttctagtgtgatgataaaaaagtattttaaaatttataaataattttgcaaaattatttcatatcaaattgacattcatcccaaatacatattcaaaatacaaattaaagttccaacatgatatacaaaaaatagtatcgtcttgatcttgagacacacaaaaaacagagaaatgtcacaaaacagagtgaagactacttcttcctcgtttgatttcttcaatgatcaagtaattagcatatgttggacttcttgtttagttaggacttgttgattatctgcaaatgatcaaacgtcaaacaattgatcaaatgtcaaacaattgatcaaacgtcagacaattcatcaagtattcaaacaaaggacaatagaaagtagaaacagcaagatagat

SEQ ID NO: 50230 - DNA, 551 bp, Arabidopsis thaliana columbia
tcttttcataagttctgtcatcatgtttcgtttacttacaggtatcctcatatcgaaaaggatcacttggtgaagcttctcaaacaactaattttaaacccgtctttcccttcacacatgagagttgaaggaaatgctcctaatgctgctgatgttccaacactattgggatctggcaccttttcacttgtggatcgtagtaattcttattcatctactttgtcgtacctgaatttcaaaagcttttccatgaattgatgtttggcaatcaggatatgttttttctttaacttttgcatgcaattcatctgatttaatttcgaccgcacgttgtttctagaatggatcgctcagcaacatgttcctttggatctgggacttgaaaaaatcccatatatgcatagaacctgatagtggctctaaggctttgcattttagaaatttgtttttctggctttggcaatctttacttggtatcatgacttgtattgggaattctggtgaagtagctcatataggagaagttaagccaggggtgcttaacttggata

SEQ ID NO: 50231 - DNA, 562 bp, Arabidopsis thaliana columbia
aatgatgatagaagctagagattagtaaaatttctgagcaccaactaaagatttatcaagctagaaactatagattctaaacattagtgatgactataaacacatcgaggaagaactgtgagattctaaacatcactaatgatctaagctatgatcattatgctcaatttcactgtaaagagttagatccaatagaatccagttaacaagctttctactccttcaacaaacatcacttgagactatacagattaacttcatttcctaaaatcttaattgccactagatctaaccctaagttcaatcatcctaaacctaaactcgctgatctagagattagggataagaacaaaccaagatcaccgccgcgtttagcagagctacagtcagaaacacgagtcgccacttcttcgaaattcgccttgccggagacaatatcttcacggatcgatttaagctgctcaacggcggcttctctagtggtagtcagaataatcttcccttctggatccttccacgacgcatttctccgagaaccttgatgcttaatcaaaatgtgcga

SEQ ID NO: 50232 - DNA, 577 bp, Arabidopsis thaliana columbia
ttaagtgtgcatatgatgtaaatttgctctgagtttttctctgacaaattctttgaatatttgtctcagtagcaatggtcgtgactttgccgtagtggatttgcaaagaatgtgcacacgcagttcctctgttctcaggctaaattctgaccaagatcagagtcaagagagcttatctagaaaggttggatcggttaaatgctcgaatggtataaaatctccaaaagtgtgtaagcggaaagaagtcaaagggtgcagcaataaccttttaaagagtctattccctctggagttgacaagcaagttagagatcagtgcagaggaagtagtcagttgctatgagttgcctgaaattttagataaatattcgggatgtccattttgtattggaatggaaacgcaatctagtagtagcgacacgcatttgaaagaagcatccaagacaagagaagacggaactggtaacttcttatactaccccacatgtgctggattttcatcagaacaatctggaacattttcagacacactggagtaaaggccatcctgtaatagttcgtagtgtgataaagagtgg

SEQ ID NO: 50233 - DNA, 474 bp, Arabidopsis thaliana columbia
ttttaaaagactctgatgatgacattaaactcactatctccagctgaatccaaagctatttctttcttggatacctccaggttcaatccaatccctaaactctcaggtttcttcttcttcctctcttctttcctcctccttggtcaactctcttttcgattaaagttgcaaactttcattagttgtcttaggctcttgtgaatttctctatctaggtaatctgttatttcttcaattcgattttttttggtttgctttaggtcgtagagttttaaattttacatctttggagtgtttcacaggtgggtttagtttgaggaggaggaatcaagggagaggttttggaaaaggtgttaagtgttcagtgaaagtgcagcagcaacaacaacctcctccagcatggcctgggagagctgtccctgaggcgcctcgtcaatcttgggatggaccaaaacccatctctatcgttggatc

SEQ ID NO: 50234 - DNA, 478 bp, Arabidopsis thaliana
cagaacagaaaacgatgactaacttctcccgatccaaatccaccggaactatcgggttcccggagtttaaacccactcgacccggtccagacaaatacgagaacatccacaacgatgacgacgagtacgaagaaggacatagcactacgagtacagactactacgacgcttcaacgccgttgagctcacacgcgtcaagatccgggaacgggtccggctcgggtcagttaacggtcgtagacttcttgcggcggttctgaggaagtcgttggtgatgtcgtgtgcgatggagagaggggaagatgacgtggtggcgtctatggatataggttggccgacggaggttaagcacgtgagtcacgtgacttttgatcggttcaatggttttcttggtcttccttctgagctcgaaccggagttcctcctcgagctcctagcgccaggtccgttattaattaattattatcccaaagatgag

SEQ ID NO: 50235 - DNA, 1393 bp, Arabidopsis thaliana
tcgattatcacaacaaagaaaaaaaatgcaaacttttttatcagaaagaagaagaggaatgaaaatttggtaatcagaagaagaagcacataagcaatggatgagggagaagaagagaagattcagagacgtacagatttcatgtgacaaaatgttagttatgtaatgaaaatttggaaagatatgactttttttttttcttttggaaattaatagaataaaagtttggtgctaaataatcttctctgacaattttatttaagtgttagattttgcaggacgtcacttgtcttagtggtggtcttggtgctgtcctttaggctctagctatggtaataacttcatactaaagacaactgtcaccgtaagaataatttgagatttttcaattgagatgtttagacttctttaacttcataattaccaattttcaataactgtatatcatgtcgttagcagttgacgtcgaagtatccaatcctaacaagtgattattttttagaaatctatcttttgggcttagaaccctctttctcttttagtgtctttcactaggtttaaaataaagcttttgaccggaaaccatctttcttttcagccgaaattaactattctaacccttcgtgttcattatcatatcctctcagccatgctctactgctttcgttttctcagatctgggttccatatctctgttttttctgaagaagttggtggagttagttcagctcgatagtcttagttctacggtgtctgttttcctcttagcttgaagatgtcatccgccatggatagggcattgatggagatgtcgttggaagaaaaggaagaaccgtttgaaatgccagatcttcctgagtatctgtctagtgagagaaacaaattcagtctcattggaagggtcctgaacccggcttgtcaaccgatgaagaatctcttaagaaatatgccaaggaagtggcagaaagaaggaaaggtcaaaggaatagctctcaataatgagagattccagttcattttcgactctgaacatgatttagaggaagtgctagcgaaaggagttcataccttcaatgattggtcaatcgtggtagataggtggtatgaaaatcctccggatgactatcttcgttacatgctactgtgggttcaaatttggaatatccagtcaattacaacacggccaaggcgatcactaagctgggtgatctcattggtgaagttaaagaagtcgtctttaacccagaattgaaacaaattcgggagttcgttagagtgaaggtgctgtttgatgtctcaagacccttaaggagatcaaaagttgtgaatttcagaaatggagggtcacgactgttaacttcattatgagaggatcagaagagggtgtatgagt

SEQ ID NO: 50236 - DNA, 651 bp, Arabidopsis thaliana columbia
gttattggatcaaatatgatagaataagaaacatattcgatcctgtccacaataaggaatcataacatttgaatatcataacaaacctgaactaaaactgttcgatttgccagcttgtttgaatcttttccaggctccgtgtctgcacgtcccatgatcagcatattgatggtctccagtgcactaagcagattaacagtctactgggaatttgttcattcagaaggacaaagattaacaaaattgcacaagctggtaaaataaatccataatgggagaagcactctatgatctaaccttttgctgggtgaacttatatgtaatccctcgcagttttagaattgaaatgataggttcaaaacccatggtttcccttagtaatatctgtataagttcaaatattagcatatgttggatctagtaaattaatcagaaaaatcaagaccagaaacaaagcttcaaaaccgtggttagatgaactgctgcgaagaagattgttcaacaactccagacagtcctgtatatcaagaacaagattagtgcaagtgccgggcaaggaatttgaagtttagcataagcaggcaatcccaaagtatgctgacatatggaaatgtaaaagccaataatgtttaggcctaaataggagaatgg

SEQ ID NO: 50237 - DNA, 521 bp, Arabidopsis thaliana columbia
taatatctctgatgcatcaactgatttcagaaacactactttctcaggacagtaaaccaaaaacttaaggatcaaaggtccttcgttggagttcagttcctgaactaaaacagaacatcctgttctcttccatagagttttgcactcatcaatctctttcttcacttcctctacacaactcttcaaaatccaacctctgaggtcttcatgtgtaggaatagaaacaccaaatcctccagaaacaatcgcatcgataaacggttgaacattgacagaattcgccgcatcgaaatcagctccaatatcaaacagaaaccgtcccatagccatatgaactgttttctcccgctctttcgaagtaggatgcacaatgttcttcacgctactaatagccacaggaatcaaattgtccatatctcgatcaacctcaacattagccaaatcattcctctcaaaagcattattctttctactcctataagtcctctgcttcgtcctcccagtactttgaccactacgac

SEQ ID NO: 50238 - DNA, 806 bp, Arabidopsis thaliana
attactcattttcttgttagatcttctatgatcatattatatcaacaatttatctatgtgttgatggcagatgagcaactattcctccatggacggagttttgtactgcaagactcattttgagcaactcttcaaggaatctggcaatttcagcaaaaactttcaaccaggttcgtattataaaatctctgacatcgaatctctctatctttcaaatcatcatgatcataacaagtctctttcttttctcaggaaaaactgagaagccagagctggtaggttcatcattacatgtccttgtatatgattagcgtgtcaatatttcattttctttcttttatgatcgactaataggatctgtgtactgatttaaacattacagactaggactcccagcaagatatcttccatcttctgtggaacacaagacaagtgtgccgcttgcgaaaaaactgtttaccctcttgaaaaggttagtggtatacgcatctgcaaatgttctcatggcctaaaataccaacgaactagtctcgtagagaaatttatttgctctagaatttgttttttgttttttcatttccgtagaatttttctgttcggataaaatcattactagatcaaatggaaataaaattttgattttggtttggtttagtatacttttggttcgatttgagaacgtgatgttggttggccaagcaaatgtggaatcaattttggcttggttctaatcgggttatttggtaacagatacaaatggaaggagaatgctccacaagacatgtttccggtgcgccacggtgggt

SEQ ID NO: 50239 - DNA, 670 bp, Arabidopsis thaliana columbia
  unsure (1)..(670): unsure at all n locations
tgcctttcttctcatcctcttgtggtgatgactctgacgcatgcatcttgacattgtcttctggtggtggctgtccagaattggcggcttctacttccatctcgcggttgagaccctctctttcggctgcttttgcagctcgtccaccacgacctcttcctcgccctcttcctctaccacccctgccactggtcttagcactccctatctcttgctgcagtgattaccaatatattcaatgaatctaaggagctgggaatagacaccaaatgaatgatgaagtataatatttcaagaagaacacgagctcaccgttttgcttttcttatattcctcgtcactgtcattcacttcatcgctgatgggcttcctgttttgataaaccatctcacatcagcttgacacggactataaacaaagaactagaacatatggaactaagagatcaaacatccaaccttctcttggagatgctgcgatcatccatggtaacatcaccatgtccttgcccttgggaatggccatagtcaggcaccttactcacaacttccctcagaaaatcaaacacgttatatcttccacacaatgttttctgtaacaacaaagcactttgataacatggatgacnaaaataagactttatccaaattgtggtataaatctgtacagt

SEQ ID NO: 50240 - DNA, 587 bp, Arabidopsis thaliana columbia
ccgaacataggatatacatggaaatacctacggatatgttcgtatttaatgtatcgagtaaactattttttgttttttcttacatattttatacgatatacatataactatagactaggaatgcatttagttgggtttgtttaagaacatttattctagagccaaatacacataatatggaaaaattcaaatcacaatcacatgaagaagaattaaatgaaacattaaaaagaaagcgttgtgggggtaataaataaatgggcagaggcattgcatgtgagactctgtaaagcattttgcggtgagtgttacctcaggacctgtcgctgcttcactacatgggtctactctttatgtcactgcattcattgcttatgtctctaattacacacatttatatacttgcttacaaaacgttttgggctcatacagctttagagtccaaactaattgggcctacgtacgttggtccctatagatttttatggtttagagtccacacaaatcttgttttcatactttgtggtatgtaaagttgagattcaaacaaaccatttgtacaacgtataaattatgtattaagtttg

SEQ ID NO: 50241 - DNA, 706 bp, Arabidopsis thaliana
ttcctcgtctgtgtacataacgacttcaagtcctccaaatgcatacaaggcttatttaaatcaattccaaagtgactttaagtcatttctagaaatgcgttctgaggagatggtttctaatggacgcatggttctcactttcatcggtagaaagactctcgatgatccattgcatagaagattgttgtcacttttggacactattatctacatctctacgcgacctagtctatgaggtaacatataaaagtaccaaatttcgacatttaaaaatttatcggctttaaagattcaaacttttttttgggtcaaacaagaaaagattcaaactttttatgatccacaatatagggtcttgtgagtgcgtcaaaggtggactctttcaacataccgttttatgatccgagcaaagaagaagtgatggagatgattcgaaacgaaggctcattcgagatcaatgacttggagattcatggatttgagcttggcctaagcaaccatgacgaggactacatgttacattcacaaatatctaaagcagggcagagggaagccaactgtataagagcggtcagcgaatcaatgcttgtagctgacttcggagtagacattatggacacattgtttaagaaatttgcataccatgtgtcacaacatgctagctgcacgaacaaaacgactgttactctagtcgtttctttgatac

SEQ ID NO: 50242 - DNA, 532 bp, Arabidopsis thaliana columbia
cggaaacttctatggtcgctgcttctctcagccctggctccactgtatcggtaaaatttaagcttttctgctcttcataccgaattaacactcgatgactgcatattttgatcctttttaaggtttgaaatgctaatgataggtatcactagcttctccggagagtagattttcgagaagcttcccactcagctcgattaaagctgaatatggagatgacagtgagagtatcattgctgatgaaccaggaaactattttgtgcttaccaccgttttctcttcttcaaaggtcagatatttctgcttctaagtgaactttgcgttctgattttgttattggtttggaagaaagatttcaatctgttgtgtttttcaattgcaggttttcaaagatgctgttcgaatttcattgaatctttgctatgggcttggttgtcctgtttcaggcaggactgtttttgtttacctgttagcggaccttctttaagtgatcaattcaacgggaatggtagactcgctatgatgatgttac

SEQ ID NO: 50243 - DNA, 484 bp, Arabidopsis thaliana columbia
gtgtaaattgaatcgaaagtggattcttttagtctgcattacttgtctcattggattttactatattcagaaattggtttgtgtttgggttatttagattttagtcaaagcctttaagaaatgtttccttttacaggtgtaatttccggtgcccttttgtacattaaggatgatttcgaagttgttaagcagagcagtgtcttacaggtatataatgtttctagctttacctcttccaagctggtaactttcagtgttagtagtgatttatgaagaatttgatctttgtaggaaactattgtaagtatggctttagttggtgccatgattggtgctgcagctggaggttggatcaatgactactacggtcgtaaaaaggcgactctttttgcagatgttgtctttgcagctggagctatcgttatggctgctgctcctgatccgtatgttttgatatcgggtcgtctcttggtcggtttaggag

SEQ ID NO: 50244 - DNA, 565 bp, Arabidopsis thaliana columbia
cctatccaggggtctagatgcgccattgatcttagtccaggttctggaaatgccagtgtctcctgtcactgtttggttagattctgttggaatgtgagttttttttagcttgaatccttttgttttgaaaccattttctattactatatattgaatcttagcttcagtgcagagaagacgctcacagtcctgtggactgtaaaactgctgcaaaatggttagcaatacacgtttctgatatccaaaacccggaacgtcggtatatttcccatttatgaaatgattcagtctttttggattatgattttaggctactagaaaatgcggtgccttgtcccaagtgtaagctaaggatcccacgaaatcaagataattcactgaagatgaaatgctgaccttgtaactatgttttctgttggtaatatacttgttcttctagctactattagctcttatgatcttgtggttaatcagtatgatcttactagtatgctctttcatgaaatgtcctctgcaggttctgccatgtcgactggattgaagacatggaaggacctggtggtga

SEQ ID NO: 50245 - DNA, 542 bp, Arabidopsis thaliana columbia
tgcggtatatatcctcatcgggaagaagcacaagagcattttcgtaataaacagcatccagaaacttctcaggctttctggatttctcataagcataaagctgttgtaatttgttgtccatctcatcagctgctactgcttggagctggaggatcacattggtcagttggatcatatgtgacgactaaagagataaagaaggtaacaaaacatcaaaagaaaacctacatgcttgatgagcttatagatcagtttgtctaatgtgaagagaacatatgactgggtcccgataattgctcggcaatcatcttcgaactttgaattatcggatgtgccatcgagcaaattgtagagagcatccatgattctgttccaatacagaaactcgatgtataagcaacaacacatatagatgcgtcctgtggtaattggtataaagaaccgcaaaggaaagtcacctggcgtacgaatcagcggggtttgttggatttgaggtctccactttctatctggagatgatgaattgatttttgctgataata

SEQ ID NO: 50246 - DNA, 575 bp, Arabidopsis thaliana columbia
taacacttttttcactttgaaagactacattgataataaacttggataccttacacaacacaaagacacacattacatatactaatttcactacttgacactattgcccacttgcacttagactaatcataactcttacttagaccatactcctatgttttaggcactctttcacaagcctcctacttgtgttggaatttctaataagataaatctaaatttttgggttcgggttcgggtcaaaattttcggattatcatgtattacagaaacattttcaaaagtaagaaaatagaaaactgccaagaattattataagaactgggtttttggctcttatataagagttgattcttagaatttaaactaattatttatttaatttttgtaaaacttaatgctaagaacttcttaagaactcaccaataatgatggtctaacaacacttgcaactattctaacgtagacttaactacctgaaacaacactttactcatttgggtctaacataacaattaggccaagtacttattaaaaaacaacaagcccaacatcccaatttcagatttaatata

SEQ ID NO: 50247 - DNA, 624 bp, Arabidopsis thaliana columbia
tccccagggttttacaaagtcttcttcctttaaaacaaagccagcaactaagatctccaccgctaatcgctattacaccaacaagaaaaataaagaaagaacaaagagatcaatgcagagcaaagagatttcaacatgaaacagcaggaatttaaaactaactccttgattatgattttctccaattagctttgaattcaaactcctccaatgtcaccagttctcctagccatcttcgtcccagtgagcccagctccagcagctattcatgaacacatgtagaaacaaaacagaagactaagaactatacaattatcatcactttgattcattttatttcttaaaggaatctaaaactgattctactttttatttacctccaaaagatgctgcaacagcaacagaaccagcaacagttccggcagcctcagcagctgcagcaaacccactggctccaattaccggaactattgtgcctagagttggagccaatgcaccgaaccctgcagctattgctggagcagccaatcctgtttcacataatatgtaatcaaaacagattaagaattagcattttccaaacacatactcttaattttctgaaacgttggagagatattacag

SEQ ID NO: 50248 - DNA, 435 bp, Arabidopsis thaliana
ttcctaatatagttgtgttattcaaagaaaaaagcttctctcttatgcagataagggcattgcttcattgatatggttaagaaatgttagttgcgtatcctgcgggaactatcaacaaattccaaatccctattagctgctatgccgctttggcagattcaagacctcgccttttggtcctctgattagttgttctgtctccccaagatcaatagttccttgtagcaatgtagagtgttatcattcatctttttctacaaaatatcaaattcagcctcgaaggagatggatggttagtaattaaagttttcgtctcttcggcaagttatacatccatctgtatactgctcctaagtttttttgtgtttgttcttttgatttcatcaagttttgtaactcacgcaacaactcgatttcatcggatgatgagtaccg

SEQ ID NO: 50249 - DNA, 651 bp, Arabidopsis thaliana columbia
gtgaaacttccataccatggggcattgggacagtcaccagttgataatcggaagtttcgccggcagagtaagaactcactggaaacatagactctacaaataaaaatatcacaatcgtactgaattgacattaggacagtggagaaccatttttcattcttctcccaaaatccatttaattagaatcattggtgacacgacttcaactattctctcggaggtaagaccgaatcggtgaaggatccatcatagaagcatcaaccggagaaaagaggtttgatagaaaccaaaaatctgtaaatccatcaaaagtttcctcaattgagaatttatttggaaaatctaatcaaacaaacaataacgggagtacggtcgacatcagagtcgacgctgaccgaaaaaaagcatagaaagttgctttcacaaggggtcgccttttgtctcttctcttgtaaatgactttattagtttaatgggagatgagtacatgtgctaaaattctaaaaataaagcataagtataagtttgcagtatcacatcaaacgatgtaagcccttcatgacatgtcatgatacgtttaaattcttaaaatgagatataagtattcacaagtttgttcgtataagttattttacttttttgtggggtccg

SEQ ID NO: 50250 - DNA, 1617 bp, Arabidopsis thaliana columbia
ttcataatttactgtgctacttccatgggaactcacgttttagccgctcatcaggtacattacaaaacagagatctttatgcccagtcatgttggtgttgtatatttataattgtggttttattacaggtgatggctcagacgtataggatgtgcaatgtatggggtgagccactctctcaaacggctcagtcatttatgccagagatgttatatggtgcgaaccgtaatcttcccaaggctagaacgttgcttaagtccctgatgattattggagccacgcttggattagtcttgggagttatcggaacagcggttccaggcctgtttcctggtgtctacacacatgataaagtcatcatatccgaggtctgtttttgtttttcaaatcaacatttgtttcctgtgtttttgattctaacttggtctaatctgattcttgatatgtttgccagatgcatagactgcttatacctttcttcatggcgttgtctgcattgcccatgacagtatccctcgagggtacattgctggtaaattacaaactcttgttcgattaggtggtttcttgagaagcaagcagctgaataagtctctatatttttcaatcttgaaacaagatagtatgcttaaaccaaaggttgtttcttgttcaccaggcgggacgtgatctcaaattcgtcagctcagtgatgagttcaagcttcataattggttgtctcacactaatggtactttatagagtctctcataaaccttaactacgtttattaatcttcaaagacactttcaatttgagcaaatctaaaatacttttttgttgttgataatgacagttcgtgacaagaagtggctatggtttactcggctgctggttcgttctcgtcggatttcaatgggtaaagacagacatacacagcaacattttgttatcagagattttctctttatccaaatctgtctttaaccaaattatggttaacattgcagggccggtttggtctatatctacgacggcttctttcgcctggaggcatacttaattcagatgggccgagtccatacacggtggagaagattaaatccatttaagtctcagtttgatgatctcattgattatctaagagtttgccaacaaatggctaattatgatatatcaggcaccaatgtcaagaaacggctaattattgtcaacttttttctttggtcagaggctcaatgtaaatttaaagcataatagacaaataatatatacaagtgtggttagttcaatcagttagaaaagatcaaattcactgatagatcgactcttcacaaagcttcccagcaaaggagaatttggcataaaagatcaatgtgattgtatttctaattgtattattattggagaaatgaaaatgcatcactactcttgagatgaaaacaaacaaacgggtaaaaatttaagccgttggaactctacttccgcctctgcgtccacgtccatcaggtctctctgaatactctcttctctacaataaccaaaagattgaatgatcttcaaactctaaagaatagagagtaaatacgccatgttttcagggttacttacaaagggtttagtgggtctagtgtttgc

SEQ ID NO: 50251 - DNA, 634 bp, Arabidopsis thaliana columbia
tgcaactttagagaaaaaagtagatgaaaatatcaaaaaattgatcatgaaaatgaaatgtcaattgtggcttaattgtatgtgtgtcagtgactcagtgtcatataaagaaaaccaccgttcatttttttataatacgattcattttaaaataaaaaagtctgtcaacgtaacaataattccaggccagtgttgttgtctttgatgctcacatagggaacaatggtatctagacttgatttttttctttactttattactaacgttcaagatgaccaaatctgaagaaaattataggaacttatttctttgtggatgcgtcattctatcacgtacgttaactccttctgatcattttcgtaagtgattttgttataagaaaacaaattgtctgtgtatcatttattatgtaaaggcagtaaagccatgaacaaaaaaatacatgattttgcttttgctttgtttagcaaacccaaaacgagtaaaggtcacatttacgttgtaccaatttcttaattctttaacaaaatcatcttagcaaattgcaatttcacgttgcttatacatgataaaagtccaacaattccgcattaaacaatagaaaaatttggaggctcgagaaagagtgatgaga

SEQ ID NO: 50252 - DNA, 500 bp, Arabidopsis thaliana columbia
gggtaccgagacggccataggttgtgcctctctacatgacccttcagtggcgatcttgtgaaggccaaacaactccatcttagcttcagcaccaatttcttcagctttcccggattcttccaaaagatttacagcagccgcaaaggctttctcaagttcactcctctcaattccttcccaatcatcatcttcttcaatagtcaactctgttttctcttcattctctgcttcagcatcactctcctccaccatattactactcttttcaactctaacctcctcagattcagcgactaagacatctccaccactttcttcgttttctacgcaaccacttcttcctaattctgttacttcctcttgtccttgactcttaatctcctccgctaccacgttttccggcgagacagaagaaatggactcagcttcagcagagtcgctctgttcgtcctgtcctcgaactaagatcactcctcggcgatcacataattttccgacga

SEQ ID NO: 50253 - DNA, 583 bp, Arabidopsis thaliana
agttaaaattagaaacttttggtggaactttgatcaaagttgtgatgttttcttgtttgttcttaccatgaacagagaaaactgatgtcgaatctcaagagaaactcgcggaaaaggcgaaacatgggacggcaggattctatgtagagctagagaacaaaagagcaatcaaggttcaattacaatgaccaagagaaaaacctttagcaagattacgtagcaaaggagagtatacaactactctcggtgcttaaaacctcatcaatgcgcaggtctttggaaaaagcataatgatcggactattcataacgctgttcgcgggaatcagcctttctctattctctcctgcattcaacttggcaacaaacgatcaatggagtacattgccaaaaggcgtacctaagctcgttgtctataccgcctttttctacttctcaatcgcgggttttctcatttctttgattctaaacctcatctttctttaccggccaatggtaggcttagcgagatcatcgcttaagaagtatatatatgactccaaaggtagaggttgggcgggttttcgctggattcttgtgcgggg

SEQ ID NO: 50254 - DNA, 578 bp, Arabidopsis thaliana columbia
  unsure (1)..(578): unsure at all n locations
tttatttttattctatctatattgcatcactaacatttttttcctttctatttctgtagtttaaaagactcgggtctttttacttctttgtttagtggttattattacattaagaaggaaaaagtaaaacaaatcatcatataaataagaggacgataaggatcggtcttcagctataaacaagtaaagaaagttgagattcggagactctttataagtcgttggatttgtagtaaataacaaattaacaacacaacaaattaacaacacatatactacaaattcgagttaaaaaccccaatataatatatgcatcgactactaaacgcgtttcaatgactggtaaacatatgtaactatcgctgtgtcatattgaatgaatgatgatgtaatagtagatgctaacataagctcgcaattatttgaataattaaagtcataaataaaaatcatctataatgcgtgtaagcttgcataaaaatacagtataccgcgtctatttaaactatntagtacgacatcaatcggaaaatgatttgcttttgaagttattcaactagtttattaaaaaattgtta

SEQ ID NO: 50255 - DNA, 536 bp, Arabidopsis thaliana columbia
cagtgtgctctaaagattttgcgttgttccgccgtcagataaccgttacgggaacttagcgccagaccgtctttggcgcgcataattggcacaccgacaatctcaatatcgaagcccatatcggcaaccattttgcggatcagcgccagttgctgaaaatctttttcaccgaagcaggcgatgtccggctgggacaggttgaacagcttgctgacaatagtcgaaacgccgcgaaaatgtcccggacggctggcaccttccagcatggtcgaaaggccaggaacgtcaacgtaagtgtgggtttcagtaccgttcgggtagatctcttttaccgaagggtcgaaaactaaatccactttacgtttgtttagcttctcgcagtcctcctgcaaggtccgtggataacgagccagatcttccgggcggtcgaactgcatcgggttaacgaaaatactgacgacgaccacatcggcgcgggctttggcttcgtcgaccagcttcatatggccatcgtgcaggttaccatggtaggcaca

SEQ ID NO: 50256 - DNA, 608 bp, Arabidopsis thaliana columbia
gaacaacaccaacacctatttagctgttatgtcctaataaaaataaaataaaataaaaacaataaaccaaaaaagtaaaaaataaaaatgtttgactaaaattctctttcttttccgattcgtcattcgatgaatcttcctttcttatacaatttggataatcttttctaatgtaaaaattcgagatttttttttataatgttaaatctataaataagagcaacctaaaacgaacaacttctcccactttccttattttcgatcttatccttatcttcttccttgttctatttctcttctaactaatctcttctcttctcttaaaatcaaacgtaatcataaataaagatcttcttgtttaatttctcttgatcctcgcaaaatcacagattcttgaaattcttttttcttgtcttgaaattcttgagttcttgagttatgaaaagacaatggacagagttatgaaatgataaatctcaaccaattccttgtttatcattctatatcagttgtgattcttcattggttttacgttatctcttgaacaaaaaaacatggcaaacgcagagaagacaagtttcaggtccgacatagatgagaagaaagaa

SEQ ID NO: 50257 - DNA, 567 bp, Arabidopsis thaliana columbia
gttttctcgattaagattgaatgaacctaactatgtagttgcttctttcacacacattgtcagtctagaatacagtttaatagactttaattgagtctatctccaccgcctatgggtcttgttgttgccgacggaaggatagactccaaaggggaaatgaaactcggagcaaaagaattcactccaatctcttcaatattctttgacatatttaccataaagacatccgcaagaagaaattttgtatcaagcgtaagtattttcttttgcaaaagttattccatttaggagacaatgttaaaaagctagtgtagagtttggttggtcaatgaaggccttggaaataagtaataacggtacaggagatgctagctggaggtcggggaaaccgtggccatgggaaccgtgatggtcgacaagaacgttcgcaaccgcctcagctcaatcacacaccaaggggaccgtcggtacgaagacggcttacggttgtggtcccaactcgaccaaacccatagatatccttggcccacagttataagctctccttcaaatgtctttgttaaattt

SEQ ID NO: 50258 - DNA, 739 bp, Arabidopsis thaliana
gggattattgtctcttatgtccaagtccgggatgtatttgcctgctaagaactgcccaaggttgccttggtttgatcttattctggctgacattggagatcctcaggtattaccttatgaattccttgcaagataatagagctactaacgtcttgattatcttcttatcgaggtttacatttgcgagaattttcttttataaacttcttattgcagtctttggagcaaagtctttcaacctttagtggccacatctcacggatacgacagatacttgacattgcttcagaaaattcacttgtcttactagacgaaatatgtagtggaactgatccttcagaaggggttgcacttgctactagcatcctacagtatattaaaaaccgtgttaatgtggcagttgtatcaacacattacggtgacttaagtcgcttgaaggataatgaacctcgattccaaaatgctgcaatggagttctccatggaaactttgcagcctacatttcgagtactctggggaagtactggtctatcaaatgcattgagagtagctaagtccattggtttcaataaaagaatattagagaatgcgcataagtggacggagaaattgaatcccgagcaggatgtagagcggaaaggctcactctttcagtcccttatggaagaaagaaataaactaaagcttcaggcaactaagactgcagcttttcatagagacttaatgaacctttaccacg

SEQ ID NO: 50259 - DNA, 436 bp, Arabidopsis thaliana columbia
caatccgacatgatcacttctccaaataacctaaaatagctgcccagtaaaaaaaatccctaaacccaacaaccaaatcaccacgatcacaccaccatccagacttgctagacgcaaaaaagtcatcgtgagtttcatcatcgatctaaaatctaaaacctttcacttctataaggcggaaccaccatcttttaagcttaacaaccataacaaacctcttacattatcggcaaaaaaatgctagtgaccgatccaaattaaatatattttttttttttttcacaaaaagtgatactttttatatagatcaagtgttgcaaaagatacaactgtggaaacttccacttacaaacttaactaacaagttaaagcatacattgttaaaacatggatcttctaaagtgaatgaagactccattgaacatacccaaaaggt

SEQ ID NO: 50260 - DNA, 524 bp, Arabidopsis thaliana columbia
gtagctgtacggcttggtttggtttcattgtgactgggtcactgtttctttgtcggcttcatgaaccaaaccgaagtaatatctatctggggacaattagacgttgtgacaattataaatattcttatcaactcggatacgtaaattagccgatacatgaatatactgatatatatttaaaaaagcgaaccttttacttgattcggtccgaagatatgtaacattcagcgtataggtaatgttattattatcagttatacaatatagctgttttacttttttgtaaaaacaactcgggtgtttattgctttgattgcaactcctacaaagccgggcaataaatttatgttaatattcactagtgaatctatcccggtatggggacaagtacatatttatgttttttttttgttatcagataacacgcgttatgattattgtgattgatgtccttaataactcgacccactaggtgtccttgtcttcttttaggagtaccacatcgtgattaaccaatgacaggc

SEQ ID NO: 50261 - DNA, 586 bp, Arabidopsis thaliana columbia
atcaaaccgcacgtaacaaagaatatatcgtaaaatgcaagagaggtaaaaccaagctacgaaccagggcacttagtgatgtcagcagtggcgtggcaaacagaaggaagagcgagacactgagagacgttgacctggagacccaaatcaggatcattcctctcttggatgatcatacaaagacacttcatgtcggaattaataacttgtttgaggccggagcaacagtctggcgtcggagattttgcctttccttgcacgtaaggaagacatgtggccataccgaccagctgcgccgtacactcttccttgtctttccctttatcagctccggcggcatccaccaccatagccaccattattaaagctattgctgtcgccattactttaatcttccgtgactccattttgtttgttctgatttaagttttcactaccatttgtttcctaactcatctagcattatttatctttttctaaaatattattgtatatgtaagtttctgtgaaattgcatgcattgccgtgtagacaagttcatggatttattttttatttggtaatgaaaaattgtgagaacaggtga

SEQ ID NO: 50262 - DNA, 506 bp, Arabidopsis thaliana columbia
aaggagaacaatagatacagtacaattttagcaaaggataaggtacataactgagtaccagtaaaggaaacaatttatacaacgattatcgatagcgcatccgtcagcaatacatgcagggatatcatcaaacctccaggtgtcactattgaagcgaatcttaagagggtcaatttggaatatttggcggtaaacagaggttgctacagtatcagctgcagcataagatccaatgaagtcgataaacagggggaagatgatatgccatcatcataaaaacctagaatagtctgaaatagagacaacatgaacatggttgcaggtgggaagctggttcgctgtgctgcttgctaaaagcgtaacatgtgaaatccttcctctactcggccctcgcttgcagccaggcggaggctctcaaggtatacagctgaatgataagaatcttcgaggcatcgggcaaagataggctgagcggtgaagagaagattctacgggcggcatttttg

SEQ ID NO: 50263 - DNA, 592 bp, Arabidopsis thaliana columbia
  unsure (1)..(592): unsure at all n locations
tattgatatagataagtaaagaagcatacgctgcacaagggggtaaattgggatcagtgcaccacccattcctttcctcagcatgcctgcaagaatatatgagagtaaacactgaatatgctcaattgaagcggtggtgagaaaataatgtagaaacttcactatataattctaacttgtggacttcagtgtcgtctcttttcttggtcatctcccatgtgagcccttcatatggctctaatccaggctgtgagatttccaaaccatgcttcttcaccaccgccagatatctgtccaagaaatttaatcttcataacctggaatgtctattaaaaggaagtccaagcttcaaaaacatacttttccgaatcaaagtgttccacgccaagatcctcatcccatatgaagatatattcatagggggcaactatgtcaggatgaagaaatcgcttagcgtaccaccttcagggaaaattcatagattgttaagtaaatctgtcatgacaaagaaactcctactaggaagaagattggcgttcctgcttagtaaagaggcactaaccattttgtttgttccgaatgncacatgaat

SEQ ID NO: 50264 - DNA, 747 bp, Arabidopsis thaliana columbia
caaaaactttcttgtatataggttctattaacctaatcacatgtggatgtaaatcctaatacctttcaaaatttaagtttattccagtattatttagggaaaaagtattagatgtttacactaaaccgttttcgaccaagtttaaaaaatatcaatacgaccaagctagttaaaaagaatatggaaatatgtttctttaatttatttagttttaataaacttgtataagatttaataaaatagtaaattttaataacgctttaatagttttacatatttctgtactttagaaatttagtaaagctaagcctaaatgatgcagctgaaaaacttaaatttaaaacgcacatttcagagtctgaaaatggttcataaatcaaaatgaagatcatcttgacctccaaagagtcccacacttgcatgagaagaaccctttgaatcatttttccaaagagacaaattctctttctattttctttaattcgaaaatacaatctcatatactatatatgatgatgataacacgttattcagatcatgcaaccactactcatattgttatgttacaacttcaatgtcgtgaaatatccaaaatagtagactttacttcatctaaactaaaatggtagtaaacaaatcaggtggtgtctcaatttgtaatgtactgtctgaatctatgtacctgatactacctttgtatacaatcctgctgggatcaaaatcatcagctttaaggaacactcgacg

SEQ ID NO: 50265 - DNA, 656 bp, Arabidopsis thaliana columbia
  unsure (1)..(656): unsure at all n locations
tatgaggcaaacaacatgtattaagcgagtttgaatatagttgattcaatgaatttaccatacaagtaactaaacattatacggtgtatccttaaaccgattcctcattttatatcggacaaataaatgcgaagatattagtaataatgatgaaaatatgataaaccaattttgttggttccagttgtaaagtgctcgttagatagattgacttataactatgcattcgtttttctatgatatgaagtttacaggtttttgctcatgatttatccatccagctacaaaaaggaattttgcattgagaaaaggtgtaggaaaacgaaccttgcaacccaaggaacagaagcgaaagggatcaagaagggttctgcaacatgtctcacagaagtaggacatggttttcggagtggaggaggcggcaccatgggaggagttcttaggctgaggtctctcgtttaagaagagaccctcgcgctattgatgacataagtttgcactcctcttatgtccaatgcattctctatctccgatactctcaccacatcatgatacgacgatcttcttatctgtccaatgttaatgataaagaattggattgagtcaaaagtgatatatatatatatgtgtatgcattgtgtgttgaganaatgaag

SEQ ID NO: 50266 - DNA, 591 bp, Arabidopsis thaliana columbia
tatttgattagtttgatattaatgatagattactgaattcttacataagatctcctaacaaaattgtattttatattatgatatttagttatcaatggttttggagaaacattgattcagcgtatactttttgaattatttgtatattcttaataagagttctgtttttaattaaagtctaaagaagaaaaaaccattataaaaactgataatcctgacctgtgaaatgggctaaattgtacattttttttttgatttaaattcttccaggaagttttatgggaaaataataaagtagaaaatgtgaatatagaaagttgcaaaactgtattattgatatagcgaattttgttattgacttgactatgtaagcgttgataagtcaaagtctacgctgtgggttccatagtgagccaccgtttcctacacgttagaaaaaaataaatgttatgttacacacaccttctatttccagtcactttcttttagcgttttccgtcaatacgttcgttgtctgtatcaagattccaactggtgagtgtgaatactcgaactggcttttacttaaaatgagttaccagatagctacga

SEQ ID NO: 50267 - DNA, 560 bp, Arabidopsis thaliana columbia
aaagatcctctctgtcactctagacttttcctctgtttgcttcttcttacaaaatgacacacttaaaccaaataaagaaaacatttcccccaatctttatacattttcttttgaattaaagaaaaaaataaaagtgataaaagaagaagaagaagtccccagctagctccttaaagaagcacatctctttactcatttcacgattcccctgtctcttgtttctctctcacttacctcttctcgagttttctcccattcttgggtcttcatcgagaccaaatccggagaaagttgatgtttttacagcacaaacagacacagacacatacatgtgttgtgtctccctaatcccattattactaactcgcatccaattcacacttctctcctaaattccatccttttcagatccaaaacactctcctccaaaacccagattgccaaattagggaatttgacacaaaacccatctgagagcataatcaagagatagagagacaatgggagtgatattggactcatggtgattttgtaaaggagttggcaaaagcgagaagatg

SEQ ID NO: 50268 - DNA, 602 bp, Arabidopsis thaliana
caatcttcttttgcagaaccctggtttaatccctttaattgctgagtattggttttctctcagtgttactggttctgcaatgttccgggtttccaagaagttgaaactcctaaagccgcacattaaaacgttcagtagggataattactcagatttagagaagagagttcttgaagctcacgagattgtgcttctctgccagaggaatactctaaattccccctcagttcttcacgcttctcttgagttggaagccactaggaaatggctcattctggttcgcgctgaggaaagtttcttttgtcaaaaatcgagaataacttggctcttggagggtgatagtaactctgcttactttcataaaatggctgacatgagaaatctcttaacactattcactttctgtttgatgatagtggggaaagaattgagtcccaacaagccattaaagacattgttgtgacttctttgagtctttacttaatgataaccaaggtgagcagtctttggagcagagtgatatgaacttattactttcttatcgctgctctccggaccagattagagatttggatgctcattctcagatttggaaatcaaga

SEQ ID NO: 50269 - DNA, 536 bp, Arabidopsis thaliana columbia
aattaacgcttaaagaaaagactttgcatctttttgcgctttgcctctgctctggtttcttgtctcagtcttaaggtacttgaacaaaagtggacactaaacaaatattttatcatttacaacaaaccaaagaacaaataaaacctgtattgttcatacaaatatctgcaacttgaggatgaggtttatttcctcatgagctcatttagtgatgtgtataagatgtcaattctatcaacatgaaaagaacaatctgactcctaaaaagccatcagctatctgttagctacaacaagcaatcagcagcacccgccgctcgtcctggtggttctccttgatgcggtagacacgcctaataacgaaatttccaatatcacacaaaaccttaaagacttttcctcccaaatgaaacacggcagcaagtctaatctctgtcgtgcatgaactgatctacgttagagaaacacaatgatatcctctccgaattgcttaaataatctaggaaggattgataaattaccgtgcaccacttgtat

SEQ ID NO: 50270 - DNA, 538 bp, Arabidopsis thaliana columbia
cggcaacaatctctaatcctttcatcttcctcaaaattattaaaatcataggactactaatttagaaacaagaaattacaaaaaacaaaacaagaaaaacaaaacttgacttgacttgcagttgaaagtaaaaaataaaaacaaaagttgaattgctacggtggagttgtataaatatagcagagattccaatccatctccactcagcaaaagctgactcttcttctaactttctatttcttccaagaataacaaacttttttctcataagaaacaaaacaagaattctacaaaacttctcattaaacctctgttttcttgtttctcttctgctctgtattttcgataattctctctgttttgtatcctttcttattttctgtgaatctgtttttttatggaaatttaattcaaaggcttattagaggaagaaagaaagaaaaagaaaaaaaaacccacctggagctatggctgttgaaggtaacctaaacataaaatttgtttgctttttggtaagaaagtgggggaaaaaataaaa

SEQ ID NO: 50271 - DNA, 351 bp, Arabidopsis thaliana columbia
tacacctgaagtagaggacctagacttacgactggtcacagccaaagagcctgcagcgtccacaatggcagtacgtatcggcagactatgaacgatatcatcaccgttaggatcatgatagttatcctcagccataatcgaaccccttcaagggttcagcatcagacatcagctctccgaaggccttctgagccacgacttgaggccccgcacacgagaccatccagcagtgggtagcgggatcccggagaagtcatgacgggatcaggaatggaacgcaaagatatgagtgtcaggctcattatgagactctctccgtgggtagagagaccgctaatggagtgagaccca

SEQ ID NO: 50272 - DNA, 656 bp, Arabidopsis thaliana columbia
ccatcagaaaatgaagaaacccatgaaattgtcgttacatgatagaataataataattaaaaaagaggcatttcacacagaattcagcagaccgacgttaatgacttgcctttttcctcattagaattaactggagccgtttcaggggactcacttgttgatgtgcattcccccggtatcatcttggctttgtggaaacacgaaagaatgtggaagaggaatattcaaggcgcgactccagaatacagagtttgccctggcataattgaaaaaagtcgcaagatcactaagcagccctttacaagacacaaaagtctggttctactaacaaggaataacaccagtaccaaacataccagaggaagtgttcaaaggagaccttgctgcacgaagagagaaaacaaaatatgattatcaatgaacaataatttggtctaaaagtagtgtaaatatgtcaacctttcggaatcgccatccaaaataagaagctttgtcaccaggacctccaccttgtcatggtaaagcgagagaacttcttcttctgagaatgaatacacgatggttattgggtttaataaatgaaaagagacaatgtggttgctattttaaggacgatatgataagacaggaatacatgatcaagattgagacctgta

SEQ ID NO: 50273 - DNA, 756 bp, Arabidopsis thaliana columbia
caaaagtcaaatcaaattctcaacatattcttaccgagattgtcttggtctgaatctcaccaaccaaaccagcttcaggatcaagaccaaaccctatactagagaacatatccaagttcttagaaagacttttaagaactttcgccttcttcttcaacgccttcttctccttctccataaccttaaccttctctttctcctcgccgcatctcgttggctcgatatagtaattcacatgccctttatccgcaaactcattattacacacaataccacgaaatcttctggttcgaaaccctaccgttctggtattaccggaaaattccgatactaatcggagacctgcaacggaacctgaagaaacacatggaatttgtcggaggacgacgccggaaacttccatcctcgtaattagaaaggtggaatcaatgaacttgtgtgacttgagccttaagcgattacgataatatttgttatacaaatcctttaaggctaagttctttgttgagggagatttgccagttcttttacaggagagaatttaacagtgagagataacgtggcgtgttttggttggttaaaggtgtcgtgagttgcactcaggctctccacctgtggtctcatgagtccacactttcccgcgcccctgacacgcgccttgtgatgaatctcggccgttgattaagagtttggttgagatgaacggactaaagttacgacaagggtacatgtcggattgcacgtggaaaattttgt

SEQ ID NO: 50274 - DNA, 592 bp, Arabidopsis thaliana columbia
tggcaattattgcttgtttcctctaggctgcatttgtgccggactcagaaaatgcttttgacacaagttacttccagagtcgctactcgtggaactattcgggtgagcgatgttttccaaccaatgagaatgaagattctagtgaaggtgacagcttgtgtggcagtagtggtcgcttgagcaatcatcacgacgagggggtaatatctgctgatccactctctttacttactcgtcagaaatattgacgttaaatttttagatgtgtagtgccctgaattggatcaatgattgtatatgcaggttgatataccctgcggacctgcggagttcgaaactagtgtctctgaaaattacccattcgataatttctcgttcaaggtattttatcatgactttcttcctaagatcccttgtcacccaagtatacgatatatcatagttttatacagttgtagaagttcccttgcatgttcatttaggattgagaacttgctgcaaactttatcagtataattagttgggtcctaattaaagttgtaaggatggctttgtatgaggatgacacatcaatcaagtgcaacataggttg

SEQ ID NO: 50275 - DNA, 635 bp, Arabidopsis thaliana columbia
tatagatgagcacgaggtgaggggaaaagacctaatcagcctgtttaggaggataggtgagtcaaaaatcgcgttggtaatcttctctgagggatacaccgagtcaaaatggtgtttggacgagctggtacagatcaagaaatgcgttgatcaaaagaaaatcatagcgattcccatcttctacaagcttgatcccgcagtggtgaagggtcttaaaggaaaattcggcgataaattcagggatctgattgagagatatcatcatgaaccagaaagataccagaaatggacggaagctttgacttctgtttcccgaacgtttgcattgtgcttaccagaacacaggttacgatttttcaatcataaaaattgtctgtttcttgtagcacaagataccaagtaagtgtaaaggaaagctactaaacccattaatcttcttttcttttacacatcaaagtgataaatctgagaaggatttcataaggtcaatcatcaaggaagttaagaaagccctgtcaaatatctccagagaaagaaatggagatagagaagaaattgacgactgtttcgtggtttctgaaaggaactcactaccgatatgtacgatacccagagtaagagcttttttcatatag

SEQ ID NO: 50276 - DNA, 650 bp, Arabidopsis thaliana columbia
  unsure (1)..(650): unsure at all n locations
tatcattgtattgcttcagagagtatttttcaggtgaggtattatttgatctcatattaagaatagataaatcgttctaattgtacatatttatctttcaaatcgtccgacgcaaaccgcccggtcacccaattttatttttttcttcatattttataaaactatatgatctctataaacgttaaatgcattaaataagtttgaatcaattgacttgttgtcgaatccggctgatcaagtgatccgatgatccataaggtagtccgatntcaccgttaggtcagatttataaacattggtaatagtaagtgctaagacatatatgcttttaaattatagttatgtcatatatatttatattataatctactgattgaagaataacaaatctttttagatcctatccttttaatttcattaaattataatagtaactaatattttggacatgtatccttcaaatcatatttaaaggatcactattaactggttttgttttacatcacataatttattttattttaataacttattttcatctatcctttttcattttatttttaatttagttttatttgttatctcatgattgttgttaaatatatatacataaaaatgtacaattttgcgatttttagatgtagtttatg

SEQ ID NO: 50277 - DNA, 404 bp, Arabidopsis thaliana columbia
gctgtatatagtggactacttttaagtattatatatgctactgcaaatttcaaaaagttaaagaagaaaagaggtcactttcttcttctctctgtgtggaatgaaaagccaaagtcgtcatggtcattgatggacaatgattatcttttttggctgagtgtggatggtgaaatcaaaaggcaaatattcaaagttctcatctcaagctcgcgtgatctatgaatctcccctaaggtaataaaatatctctgacccacacacactcttttgtccatatgatgactagatgggtccatgatttttatgaaatattgatgtcatgttcatgtaattaatttgagtgtctgtaataatgcgaactattcctttgtcttttgcttcacccacatgctactggtattgtg

SEQ ID NO: 50278 - DNA, 797 bp, Arabidopsis thaliana columbia
tactaagtgagattggactttacgggcttgcacaacaagagctttcgaggaacaagaacggaaaagacgctcgtatagccaataactaactggctctggagaagcaaagagaacagagacggctttcgagacattaccgccttcgagatgctcaagaatctgacgggtcactgtaagtttggttccggtgccgataacacgcttgtgggttttatcttgtttgaaaagacggccaaaagcagaagaaactccggtcactgccatggttcatgacctcaaaggttgagactttaacagatcagaaactaaacccatcaacatttcttctactatgggtttagggtttaaaacgaataggctcttcaatttctgtttaaaatcaatatgggcttttagtgtcggcccattaagtatgtgtttttttaaaacgaatagactcttcaattgctgttttactaagaccgatcatatgcttaaccaaatttcaagttatcgtatttgtttcttgtaaaactatatattaaaatagattacagaaaatgaaaaaaacaaaaacaaagttacatctcataatgaaaattacgacagtaacaaaagtgaaatatcaatatacttcacattaactccaattctacgatagaggaaaaaggattacttgttggatgctcaaacactgtgtcgccatatccaatacactcccaagaacaaaagattgtgttgtacctttgaaactattgggaatagcaacggcgcatacatccggtgcatattggtcgggagagcgactgttgagaaag

SEQ ID NO: 50279 - DNA, 505 bp, Arabidopsis thaliana columbia
gagaggtttagaaggaatgagaggaataagagatgtaaccatcgagccaaatgctcagaaagtgacagtggttgggtacgttgaaccaaacaaagtggtggctcgtatcattcaccgaaccggtaaaagagcagagctatatcctttcgttccttacgacgttgtggctcatccttacgcgtctggtgtttacgataacagagccccgactgggtacgttaggaacaccgagtatgatccacatgtgtcacgtctcgcacgtgctagctccactgaggttcgttatactacggcgtttagcgacgagaacgcctccgcttgtgttgttatgtgatgttttttttttttggtttaatttttttttactgggattattttttgtgtttggatgttgatgtttgtttatgttccatcacgaatgtatttaagataagaacgagtgaaaaaaatgtaaatctgcatggtgatgaattggtggtaaaacaaagttgcaaaaaaatatgat

SEQ ID NO: 50280 - DNA, 385 bp, Arabidopsis thaliana columbia
  unsure (1)..(385): unsure at all n locations
agcgacgtatatgtagaaactatcaggattgatttgccatagacaagaacaatcgggtttgcatcttgatttgtctctatcgagatcaaagaggacgaaaggagtcattttggccgatgatgagaagatgacgcaattccatctagttgattggtcggtgtcaaacataagcacgtaagtctcacatcganataacacctgagacgaagtatctaatttggacgaggtgcatcttatggtgaacggatgagagtcaagtgcaaggttgttggttacatttacagtgaagactggagctgtgaaagataacgaagaagtaaaggctaaggctaaggagacaaggaagaggctatatgctttggtggatatcatctttagttttgtt

SEQ ID NO: 50281 - DNA, 548 bp, Arabidopsis thaliana columbia
tgaaacttgtaaataatacctaagactctcatctccgcgacactacttgcaatagccacatcaaacttctctctgtacataacatcgtgcccacaactctgttctataacaaaagtaggacaatgtaatttagaatcaccttactggctattaatgtcattacaacattacacaaacaggatcacagctaaggggagagatatttatagcaattccagaattaggaaaagtttttccaaatcacgaatcatagtttccaacagaagctttatataaataccatcatctaatatactctaattatacagtctaatccatagatttaatggaaaccgattctaatctcaggaaactctctaactatttcatgcatttggagtattaagttaagttcttagctttgaaacaaaaaaaaaaacaaaaaaaaatcagttatttcagaatgtaagaaactgcatctagttacccatagatagtagacaagtcaactaaaaagtgacctacttatgcttatagacaaactcatcacaaaaattaaagaaaaaaag

SEQ ID NO: 50282 - DNA, 576 bp, Arabidopsis thaliana columbia
tacctgatagaatgcatagatgttttggagaatctgctgacatgtaaagccggtttcactgaaatacgacctggaagaaggtcccatttcaccataccaatcgattggaagtagtaatgttataaaatggtttttgtataccaactccattctctcactgtcatgccataacaacaataaacaacatgagctttataaacttaaaagagtagcttggatctcaagttacatagatgaagtagaacataggaacctttctgtgagcagtctcatggagtgagtgaatgaatcattagatttagcatcaaagaaggcagataaagattttctttcgatatcgtcgttgttgctgaaactatctatgataacactagctgttgaagttggttcagatattgtccaagagatagaatctagaaggctgctcagatttaacggctggatcagagtctccccatctgttttatgaacaaagaaaatatagttcggtttagcgattgctcggttttcgaagatgaaatagagaaaaagatgaaatgcctttgcgtggcgatttgtgacagtctttttggcgga

SEQ ID NO: 50283 - DNA, 471 bp, Arabidopsis thaliana columbia
gataacacattttctaatgatgttcttaatctctttaattcacaaatagatacgtaatgcgaacggtacaaatgacacataaatgatagtaatgataatttcgaatatggaaataagtaatcgacatggtctgttacttattttctatttttaaaataaatggtatccatcaatgatcaatcacacccaattctcctttagttttttgttaagtcgcaaccaaaatttaatacaactcaactataccgacaatgaagtatttcctttcattattgtttttggaccatagcctacaattatttaaatacaagtcttacataaatccattaatgatagaatctttttccgccaacaaatccacgatatatacgtatgataaataaagtaaatctctaacttatatgattacaataaatatattataaacaatctcaataatattcatcaactagtggcaacttttacaaactc

SEQ ID NO: 50284 - DNA, 331 bp, Arabidopsis thaliana columbia
ttgagacctccatctaagtcataagattcaactaaatccaaagaagaaccagctcataagtgaattaacaaattgcaacagagctcaaaacttgaaattgactgatactaggaaaaacagcaatcatacagtctccggagaatactttcggaatggaacgcaaacgcctcgctcaatatctagctgctcaagcgcggactcgatttccctactcgcacacctctctccaccccgctcatcgccgttgtcattaccgatgcatccgtcgaattccgaccaccaacatccgtcgccgccgcagtaactgagaaattagaagtccgtacagccg

SEQ ID NO: 50285 - DNA, 394 bp, Arabidopsis thaliana columbia
atctgatgacaaaaaaaaaaaaaaaaaatctgcgggcaatagctgtaaactagtctatgttaatcgcgattctgcaggtaatgtagcttatttggttaacaaaaaatcataacaatatgatatctaattgaaacaacccgacccattttttaaatcaaaaatataattaaatattcccataaatatctaattaaaccaaccaataacatattaattaaaccgcaagtcagaattacattttatgaatatataaataattcgatcaataaaaccaagattaactgataatcctaaccgggttccaataaccaaaaacgaccatacatataacaaacgagttcctagatcatcctctcttccatgccatgattccacaatcacatttaatctttac

SEQ ID NO: 50286 - DNA, 524 bp, Arabidopsis thaliana columbia
ccgacatgatatgttgcaatgttaaaagatgacttgtaagactttatttggcaattgcagacttacatcaataagcacacacgacaagctttgatttggcaacatgttatatttagaagtaattcatgaatcacttgcgaaagtgatatgtacaggattgtgactttatatatttcacaatgctgtctttttctttacagaagttaaattatgatcatttgttagtatttgagggacacaagtgtgtgtgtatctgtcccataagtcaacgtgttttggagcagtattttacgtttcttcttaccttatcaaaatattatatcttaaataggaaataatgcatagagactgccttgatattttgaaaaaaatattcatgaacgtgtggaagaaatggtagtattttcaagtgtatgacatcttctcagacagataaaatgagactcaaagtagaatctttcaaccttttttactttatttataagaagtgtatcaagaataagacataatcctatatatactgg

SEQ ID NO: 50287 - DNA, 537 bp, Arabidopsis thaliana columbia
gctctaggaaatcctccgccatctttcccactcagacggcgaagaaatttttgtctctgccctctctttctctttctttcctaaattttctcggaaaacgaaaattgaaggacgagacgttgaaattgaatcgattcggtttctttcttcagacagacaatcagagtcgactattttttccagcgcataatttgtcactaattcgtttaatttaatctaaattcggttaattacgaaactacccctttccttttttggcgcgattgagatccaacggtttagagtcacttgagcatgccgacaaagtggcgcgaatcagctacattctcattcatttttatgaaatgcatgtgaacgaatcatttatcgtcacgtggcaagagaacgtattgtggaatgtggttgaagcatctgatttagccctttaacgttgttcaacggtaaaatgtcatggatgtttgtgcgctctcacgtgactagccgttggtcatgggcttccatgcgcgtattgtggttgttggtacatcagctgtgacg

SEQ ID NO: 50288 - DNA, 879 bp, Arabidopsis thaliana columbia
ctccaaataccgaagtttcgcttccgcttcctcctccgcagaccgaattctatctccgccgttgttttcaccacctttcttcccggcatgatcaccgccagctccggaggatgacggaggccacttatctatccaaggaggagtaggtttatgattacgttgatctaatcgacgattgttattgctcctgttgttgctacgctcgcttgtacgcagcgaagagaatggccgaacaatttgttgacgcgagggtttcacacccaacgaatagaagagcaatgcgtgaagcgaaggagaggaacaatagcgagacgtagaggtcagaggaagagagcttctcagtggcatttccgtaaaattaagtggagccaaagccattgacgacactaagaaatttttttggaaaaaaaagcttcagcgaagtgtcttcttcgccatcgttttggatactgagaaataagtttcaggcggataagctggatttactcgaccatacggataagatttttgtatcggttttaggaaaatgggcctttaatgggttttaaaagcccattactacatgttaagtttaaaaaaattacacaggtgaaaagttatataagcgacggagtcgggtctgagtaaaaccggtttcgttgtcgttgggtcaccggccgtactagagagattcaccgtgaattcgaatattaagtgagagaagctccgattgatttcactttctgccgccaatttttgttttttcttcggtgagacgaagaagataccatgggtcgacctcccagtaatggcggtccggcgtttcgatttatcctgcctgaggtttatctcgattctttgtaatgtgttgctttcacggattttgagctcccagagctg

SEQ ID NO: 50289 - DNA, 527 bp, Arabidopsis thaliana columbia
acctttttcctcatgttgctttctcatttccccctctatgattactttttctatagtgcatataattggttgtaattaaattattttttacactgtatatgtttagtttaatatgcaattcttgttttgtcccattagtgtctacttaatttagatcttctctttttttaaccaagcaaatacaatttggttgattaatgaaatgatgtttcttaaccaatatttcgaatgtcgttatgatcagggcgaaattaaattcatcgaaggcgtacaaccggcatctagatgcatcaaagagtgagtgttttaaaaacattctatcagtttttatcagtttggtttattgataaaagaaatattttgttgtggcagagtctctgattttgttgttgcaaattctgacccattgatccctgcgtaacggtatttctagttcactcaatgacttcacacttttctcgtactttgcccgctcttacaattccgttgtgctgtttttgtctctcatataaatagacaacgaaaaa

SEQ ID NO: 50290 - DNA, 514 bp, Arabidopsis thaliana columbia
tgttaatgtcagagaaatgatatcatttcgtgtgtgagtgtttatacacatatatacttgttttttctttttttttttttttttttttgtgcacctcacatatatacttgttaaaaaatgaatgttgagtgtgatattgaaggaatataataatatattacaaggtaattgcctttttatgttacaaggtaatcttagagcatgttcaatggtaagaacaacctcaactttgtatcttaactaattcttagctataaaactggttaaatttaatgaaaccaacaagtcttagctaagataaacatcttagttaagatgtttccttaaaattaagaagagtatatgtgttgtgttttgagtgggtagacattgttttgaaatagtttgaattgttgtcttttaggaattcaatagttcttaaccattggagtaaaaattaattcagcttcttcttaacttttcttagcttagtaaaagtaacattttaatttaaaataaggttaaaattgagaat

SEQ ID NO: 50291 - DNA, 715 bp, Arabidopsis thaliana
ctcgagaaggcagtgaaagagtggacctttagtagcgctatagaagtaaacaccgtagctaactgcgctgccaaaaatggatgtgtagagaagtgctataacatcatttgtggatagatcttgaagactaccattaaaaaccgggtcatgatttataacagaaatcgccaaaagaggaaggccaccgataaccatatgctgcagataaaatgagagacatgtttagtttagtttagttcttgtaagaagaactctcgaagacaagccattgaacaaaaatggggacaagtaaggattgaaaggggcgagaaggatcgagcatcattacccaaccggttgccataattggatctgagtattttgagacccatcgaaccatgacagtgccaatagccatgctctgagctgcaagaagcatccaccattctccacttccccacaaggaaaaattattaccatctgaagttactgatggaacctgtagtgaatcaaacatatcatcaagttgcactaaacagaaactagctcagacttggttagatggttaagtagatcgtttacctcaagaagcaaaagtccagcaacaccaagaagcaaacctccagctctcactattccaattgactcaccaaacaagaaagatgctaacacagctacagtcagtggctgagaatcaattatgacctgcagcgtgacggattaacaaacccaaaag

SEQ ID NO: 50292 - DNA, 449 bp, Arabidopsis thaliana columbia
taaatacacgggataaagatcaaatttaatttgggcttctagccataactatcaagcccataatttggtttacttttatttgattctatttttgctgcgtaattttctcaaagttttcaaaatttccatatttttcacctctactctctcagaagcgatcatcatcttccccaaaatgtctgattcttcctcaagccatgactcaccaccttctccggcgatcaccggagattcagaaaccacagtgaccaacaacgaatcagaatccaacacaaaatgtcaaacagcaatccaatccttatccacgatcgtcacaaacacaaacatcccttccacaataaccatcctcctcgacgatgaagccgtctccaccgcgatctcctctctcctcctacgtcccgattcaggcgccggagataacaacctctgccgttgcgtctacgacacat

SEQ ID NO: 50293 - DNA, 1109 bp, Arabidopsis thaliana
tcccggtggtgaggattcattatcaccacagcaatggtattttcgtctgccatggcctcaacaccttgaagatctatctcccagtctagatcgggaaggagattgtacttgcgaatctcgactaggctatggattgcgtgactgttgtagaggggataaattagagtcggtagcaagatattggcctttggtccggcgagggcatgaatcattgtctctatcccttggcaacaccccaccgtcataaatatatcatctgaatgtatcttatgtggaaggtcccggttcagataatttgcaaccgccctaaattaatatgagcatgcattagcatagttgcacatgttatagtaaaatctaaaccaagtttttaaacaccgattataacttcagcatgcagtaacatctcaactagtgctacatatgtcttaatatttctccttccaatccatattcacctagtgacactggttataagcagtaacttctcaactagtgctacgtctaacttattcacctaatatagtaataaagaactatgttaaacttttgtcatataaatacagtatcggataactttcgaagaaaacatattagtgaaacaattagaaactaattaattaccttctggccggtaaaataccgaccccgggggcgtaagagtttgcagctccagaccgtaaggattcaaccaccgcttcctcagcgtcaacggacgtttggaagcaagggtagacggaggtggtcgccgtgacccagaggcaaaatagtctttttgacgtctttgctgcagcagtcgaataacctagcaagtgtacctttcattgagacactagccgcttccttggccgctttgttgcctttgaacctccagacgctgccaccgatgcctccgtggtctgttgtcttgcgttcatcgtattcctctttgtccgtttcaaatgaaggcaggagaaggttcatgtgttgactcattgctccgagtgaacttcttcctcttggtttgttttttcttttgtgtgcttattcttttgtgaaagtggaatcatatatataagcatgaaacataaattagatgttttttttgctttttttgtgtgttcagtttg

SEQ ID NO: 50294 - DNA, 1052 bp, Arabidopsis thaliana columbia
atctagaatcgaacaatcaactttatactgtagacgagaatcggggaaaatcataactccgatgaaaattttaatagcaaaagtttaacataagattcacagcaacaaggaagactaagtaccttgtggagaaaagctttgctgtgctcatccttgtagtactggtagtgtgaagaatccagcgccatcaaatcgttatacagctgaaggatttcttcatagtgaacacccttgacagcatcatccgataccatagcttcacgagccatcaaaagccttgcaagagtgagctttccaattttgctataaaggaaaaaataacacaacgtttaagactacaatttctctttccaatcaaagagagaaagtatataggatatatacctgtcaggcagtataccgaaacattcaacctcagaatctatagcttcctgacgccatttaaaatccatctcagcatttaaccgatccaaggtgacaagagaattcaaatcctttgacttcgcatcccaaatatcaaatccatccgtccatgaaacaatgccttcttgagaatcttcgacggtatcatgaacatgggctgtaaagacaaactcataaggtgcgttgaagttatatcctctggaagaaacgattcctggagagttcccaactctgatcttcactttgtattcgcaaggatctgaactgacatatttcagacgagcaacccatacacaggacacctgagaatttttgttcggaattggttcccaaacaaggccctcgtttccttttagttcagaatcaattgtaacagtagatgagcttactccaccaacagcttggtcaaagtagagaatcagtggaaaagaacccgactcagaacaaaaagtagtgaacatagatgaagagccactcaagcacccagctccagacagaatgatacttgaaccatgtgaaggccatgaggaagtgagaagaggagtctcacattaagagtttggtcaagaagccaaagatgataaaaccagccactcttggtcatctggttccgtaaaaatagccgaatg

SEQ ID NO: 50295 - DNA, 1679 bp, Arabidopsis thaliana columbia
caagtttctcttgcgcccttcctctagaatgttggcctcatcaacctaagctccaacttttgcctttctttgccctttgcttggaagcacaaaacctaactacttcctatcccgaagccttagacttgcttgcagagaagggcgtgctgaagaaggtctagctctcctattaatcataccatcttcgcttccccatgcaacgtttgttacatcgttgttggaactttgtcttggcaagtatgacgaaacaatgcatacctctgctgcatttctagataaatcatcttcttttgaagcggctgatgcaattgtcaccactgtattccaccagattattcaaattggtcctcaaaaagtttgatcacactgcaacacttgacattttgatgaataccctgattgtactctaactggctgtcagatgcactatcgatgccaagactgtttgctctactggtactctatgatgtatcttgtcctatgctagtttaaaaacattcaccactcaaaattttgtatgaccatatgttttcctcatctgatatttctatgctttgttttccctatttaattacatgttatgctacaagttccactccctccatctgtttttaattttaagctcacctcatatgttccccttcactctgaataggtcttctactgtttgttttttccccttgtaagcaacacattaactcttctttcccaacacctactgtctttacaccaactacattaacttctccatttaaccaatacctagtaactttacttcaacaactcttttgaacaaccatcgctcctaatattaaccaccacacaatttttaatttcatatccataatttaccagaacaagctctccttcattgtcaacactgaaacaaaaaacttcatatctctcttcacatatcttcttacattccaatttctttggtgactgatatcgttttgagggttggataatctggttttcgcaaactaggctcgttcatcgctgtaggaactacgctcggcaacattgtcttctctaatgcgttcttatctgaggttttattaggtgtgttctttgttgtaagctctatggccaatcctgggtcttcgtaccgtccttttttccttaggtgtctcgaggctgagaacaacacaacaaaatatctagaaggttgcgccttactgcgcaacttggcccttcagttcagtcactcgacatgctcagagaagctgcgttgcatagcatatatgctcgattttcttttggaatattcctctgtctttgtggttcttctgaagttggaataagagttttagtaacctttctcgataggattccaaattttggagaagcaattgttatcgcagaacaggtatgcacacatatccgagttatgggaacactgggtcaacatgcttatcgcagctacaagggcatgactcttcttgtgtgtggtttagtccattactcggctttggacgtttgtccgtgcttacctctacattattattttgaaatctctgacctttattaagttttattcacctatgctctgtatttctactttgaacacctcaatatcattctagatttcttatgtattttttctttgaacaccaagatttctgttgtattttttctttcattataattttctatctatgctttttcttgttttaaac

SEQ ID NO: 50296 - DNA, 511 bp, Arabidopsis thaliana
cggcgatcggttgaattacatttcaagtcctcattcagagttatgtgttgcagatattacttggtggaaaaagctaaggatgcgaatattataggtattttggtggggactcttggtgttggtaagttcctattcttctgcatttgtgttgtcaagattgattttgtgatgtcaagattgataagttcattaaatgtctaatgtcacctggcaatatatgcagctggttaccttcatatgattcaccatatgcaagcactcatatctgcagctggcaaaaaatcttacattcttgccatgggacggcctaacccggccaaactcgcaaacttccccgaggtaagttaaacaacagagccttccaattagctgtaattatcaaagtgagatatgtcaagtgagtaatgtctttttctgtcttgtgtttttctcttagtgcgatgttttcatctacatctcatgtgcccaaacggctcttttagatagcaaagagttcatgtcccctgtcatt

SEQ ID NO: 50297 - DNA, 544 bp, Arabidopsis thaliana columbia
taagtttggtttaggacttaggaagattcttttatttgtctcgtgtagacttttcttgattatgttagccttaaaattcggtatttagtcacaagctgaagacaaataaatcgtcatctttctttcattgacaaatcatccgattacgcattgttttctcttttcaaaacttggtcattcaaataaaaaaaattataattccatttgtatataatgaagaatcagtactttgagtaattaaatatttggatcatgaaatattcatgtcatatacttatgtcattgttttttattattatttttttggtcaaacttattttgttctttttataatgtcattattttatacatatccaaatataaaaaacatagttaattcatacaaggcggatacaaatgtgattattaattgttcattctcttcttatttttagtaaatcgaataaaaaattatgtatggttctaaataataaaatctcatccaatttaatttaaaacaaaaggaattagataatattgaaatcgattaaggacggcaaggaag

SEQ ID NO: 50298 - DNA, 107 bp, Arabidopsis thaliana columbia
cgccagtgtgctctaaaggcatctacagtgatccccatgtagtaaagctcaaaggcatcttccagtaccgtgtggcacaccacgatatctgcgggtcacacccgcag

SEQ ID NO: 50299 - DNA, 1756 bp, Arabidopsis thaliana
ccaaaacaaaccactccaaacaagagggaagacaaagaggcaatgaatgccaagatgagcaagactgcacttcccaaaatacattaacaaaaacatagatgccaatgtaatagatcggacaaagcccttaataatataccatattagaacaagtagattttgtgtttatctatggaaattttggttccatcattttaccttgtgtatcgaatttgccctgactatatccacaatatgtactttaaagtatttgagaatccttgaaactgtgaaactctgatcggacgattaaatgtacacttttgggaatgttccccaaagtttcttttgatctgtgtcaacattggtttagatgtgaacatattcttattaattctcgtctctgggacctaactactgatacatagaagagccttcttcaacaaaaccagagctgctttataacaacaacacatataatacaagagagaaagctaagaactcatgatcctaaggattacaagacatagctactacgcttacactgtcttgtttggtccagtctcaatgactagactccgctttgaacggccaaggagtgaaagtgatgccacgagcaatgaggtagaggatgaatgcaccataagaagctgtgaacagtgtcacaaaaccggtatagactatgccactaacctcattggagaagaactccaacaaaagataaccgttgatcattatcacgagcgcagcaacaagccacgcgattgtctgcacaacaaggtgagatcgagcttaataaagcgatctttaaagaatgttagtaaaagagtttgaacgaaattgacaaaccttgtacaaaggaccaatcttgaagctacccatgatttgttccttggagaccaaacaaagtaagggaatgagtgcaaaggggatttgaatggactgaagcacgttaagccactcgtttaagacatcgagtgtagcttccgatgaatcaaacactagcgcaacgataatagttggaatgatagcgcacgttcgtgtgatcaaagctctcaaccatttcttcattttgaaattaagaaacccgcccattatgaactgtcccgcatatgtaccggtaatagtgctgctttggccagcagctaatagcccgatcgcccaaatgtatagtatcgggaacacaccgcctccatatttctcctgaagatactgtcccgcgttaaccaaaccgatgctattggcgaggtcagtattataaaaccctttggcgaaaacagttgtgacaaacagattgatcaaaaaggagatgaaaagagcaattgtggattctattgtgtagtagtttagcgcttcttggactcggtatttctgtcgtttatcgacttctctagattgaacaagagctgagtgaagaaacacattgtgtggcattataatgcaacccacaactccaactgctttctgtatcgttcttgaactcagtttcggtaccaaaatccctgcaacaagagaaatctaacttcttcagaacttaaaaagttaaaagactgttccattaagaaaatgataaagagaagaaagaaagcctaaccaatgagaagctcagagccacttggcttagcttgaccaaacatccaagcgaatgagactccattgtagcgataagaactgcaaacacagcctcgagcttccttattccgtagttctcaagaaacaagaagacgaaactgtgaccaaaacacatacatatgaatcaatgagatacatacaccaa

SEQ ID NO: 50300 - DNA, 414 bp, Arabidopsis thaliana columbia
ttgccaaaatgcctcctgattacaacagatccgcgcttttcccaccgcagaactggaggattaaagggacgctaaacccggattactcgtgcgggccacccgttcgggtaaccccgactttttatccggatccgagtggtatgccgaccaacaaatcatctttcgccagttggcagatcgtatgcaacatcacgcaagccaaaaccgagataccaaaatgttgtgtctccttctctgctttcttcaacgactctatcatcccttgtaacacttgcgcttgtggttgcgtttccgaaacgcgacgcacatgcagtgcagaaactccgtctcttctcatccctccagacgctcttctcttacctttcgaaaacagaaccgctctaacgcttgcttggaacgcactcaaacacaaaa

SEQ ID NO: 50301 - DNA, 391 bp, Arabidopsis thaliana columbia
tatttgcagaaaagagactagacactataagtgcttaccctgtacttatccttcacatcagacgctgaaagagtgatttctgcttcaacctcgacctgagaagttgactcactcatgttcacctgcataacacaatattttaaaatcattaagtataatttctccacaatgaagagtggctaccattagaaggtattcaatacttatcattgcttgtataccttatgtgttttagccatctgtagtctcgctatagttcgcgattcatctacttccaccatctccccagcctttatacgataccataacttacaggtcgaggagtatcccaggttaacaaaatcacagtataacaagatgtgattaaagcgaagtagtaacctcagaaagt

SEQ ID NO: 50302 - DNA, 431 bp, Arabidopsis thaliana columbia
tttaatagttattaccagaaggaaggaagagcttctggttcatgtgacttcaaaggtgtggctatgatcactactactgacacaagtaagctctttttttcatcttctttttctcttgttatggtttatagtttgaagatctagagtaaaagacttatgaagatcaacaaacacgatctgagtctgttagtttctagatcctaagttgggagagtctataggagctttaacaagaaaatatttatcaagatcatatacttgttgtgtagatgatctcgagttccttaaaagttcgagattgtgagttacatggatacattacatagttctttatcgctgttccatacatttcgttatgaaatctatgaaatgaggagatgcgtatgtgtcaggtcatggaagctgcatcttcccgggaaggcatggcaagt

SEQ ID NO: 50303 - DNA, 1924 bp, Arabidopsis thaliana
taagaccacttgtgagaacctatcaagtgcaatggctgacttttggtggaacgctcttgaacataaaaggaagactcactgggtcagttgggagaagatgtgtctgtctaaggaaaatggagggttgggctttagggatattgaaagtttcaatcaagctcttttggcaaagcaagcttggagattattacaatatccctcctgtctttttgctcagtttttcaaaaaagtcggtattttcctgatgaagatttcttagaagctgatctaggagccagaccatcctatgcttggagaagtgttttgcatggcagggatttgcttactaaggggctaaggaaagaaattggtaatggtaattccataagtgtatggatggacaactggatttacgacaatggaccccgtatccctcttcaaaagcatttctctgttagtttgaacctgagggtgaaagatttaatcaaccttgatggaagatgctggaatagagatttgcttcaggatttgttttttcaggtggatattgatctcatttgtaagaaaaagcctgtggttgacatggatgacttttgggtttggttgcactctaaatcaggagagtattcggttaagtccggttactggttggtcttccaatccaataaaccggagctactctttaaggcttgtaggcaaccgtctactaatgggttgaaagaaaagatttggtccacatctacttttcccaaaatcaagctctttctttggagaatattgagtgctgctcttcctgttgcggatcaaattctcagaagaggaatgaatgttgatccttgttgtcaaatctgtggtcaagaaggtgaatctataaaccatgtgctttttacttgttcagtggctaggcaggtatgagcgttatcgggagtccccacccccgagtttggttttcagaatagctccatttttgccaacattcagttcctttttgagctgagttttttagccagggttccagttcaggtaaaaaggtcttggccttgggttttatggaggttatggaagaatagaaacttgttattattcgaaggaataagtttttgccccttaagctccattcttaagataggagatgatgtgtaggaatggtttctggcacaatctcttatccgtctagtggatccagaggagaacaatcgggctgacccttgtaggccacgttgggaccctcctccgataggttgggttaaatgcaatgttggagcggtctggtcagggaaaaaaaagctttgtggtgggtcttgggtcgtgagagatgatcgtggtcaggttctgcttcacagccgtagagccttcgggaatcttacaactaaaaaggacagtcagatcacctgtgttctttgggccattgagagcatggctagtcataaattatcgaaggttctgtttgctttcgaaccgggagacttattgtttgcttttgttaggccgaaagcgtggccttcttttgctttacaggtttcagaactaacacatttttttgaaaagattggagattggaaagtggtggaggaaaatgtggtttcaaacaagggggcttctcttatagctcaaagcgtggtcaaggatggaaggctacaatcttatgttgcagttggtcatccgctttggcttcatcagttctttgagggtgagagaatctttctttaggtcttctctccttgtatttggtttgttttttggtccctctctaatctttggctctgtagttgaatggcactttctagtgtttcattcttaaccgtaactggttttttttaaagattatgtatcccaacttttatatatatcctttcagtaagaaaaaaaaaaaaaaaagtataattaatatagatggaaagttggaatgatacttttgaagtgtttaactgaaaaaggaagctag

SEQ ID NO: 50304 - DNA, 523 bp, Arabidopsis thaliana columbia
aaagaacagtggcaggaaaaagccgaaaccctggcgaaactgtttatcgacaacttcgataaatacaccgacacacctgcgggtgccgcgctggtagcggctggtccgaaactgtaatgatttgaagctggagaatatctatccagtatcttatagaaagcaaaacgggaggcaccttcgcctcccgtttatttacccttcttttgtcgtgccctgcgcccgcgttaccggcactggcagccaggcgcgaatggaaagcccgccccgctcgctggtgccaagctccagcatcccgttatggttatccacgatacgctgcacaattgccagccctaatctgtactgcacccattttgttggacgatgaaatggaatagcccctaatatgtcaaagccaaaatacgcttttgaaaagcgccttgaagtcgtgaatcactacttcacaactgatgatggttaaggatcatctcggcacgttttggtgtccccgaacccaggtcaggacatgggttccctctatgaa

SEQ ID NO: 50305 - DNA, 530 bp, Arabidopsis thaliana columbia
taaattttagtgtcattttgattactataatctcaatggattgcaatagcgacaaatcttcacctaacacacgagcatattctgcttaccggtccgattagatttaattataggaacacgacaaaacctcagtaactctttaagtaccgcaaatgaaacttattgttcagctaaccaaattatccatctcacaaatgggcatcttcccttggattgtctctatgcaaattgtaactccaaattctgatatatcacgacttcatgatcacttgattctattctctatgggtggccgtctctagtctttgatactcaagtatttccctcccctctaggatgcttattcctgttgggtgaatgtagttttgcttactttttaaggcaattattgattatattcgagcaatatgccacaatatggaaaggttacatcattcccaccaaacaaaagatacaactatttatccattacatacacataaaggaaaaagcacaaatattattcttttacgtgtaagtttaatcctttg

SEQ ID NO: 50306 - DNA, 549 bp, Arabidopsis thaliana columbia
ttaattcctttgaattgtaaccctttatgtgttcaagtacgccctaattttatcaaaatttatgataggaaacaaaattctaccaccgtgttatgtttttactaatttttttttgtagttcctattaattttgtcatttgcaactcagaatttttgtattatagtataagtataatttttatggatagtggctttttttgcattgtgcgtattcctgtatttaattttatgtgacttgatttcttgatatcagacaaagagcaatgaaacccacgtacgtacccaataattccgcgtaacgaatagtattattgacaagttgtcaaaataatatataaaatttcttaaggcatatgaaaaaaacaaaatgtattaagaatatttatcaggaagataataaattaattaagagaagtgtatggatgagaaggaaacacacgtgggagagagatgagagagggaaagagaggaagaggtcaattcggcggagacaggaaagggacggcggccacggcggaaggagacgttgttaggggaagtttcgacaag

SEQ ID NO: 50307 - DNA, 1136 bp, Arabidopsis thaliana
tcccttttgcatgaagtggtttctctgatcatttacgttgaagcatttactcactagatgcaaaatgtttcttgatttgctttttttgttggatttttctgtccaagtttttgctttatattatgtcattgttgcttctatgtttagaatctgacctctattaaatgtgaaacttcattagtatttttggttactatgttgctctttcgttgataacaactttgaaatgttagtcgcaccaaatttagtaaaaccgttttcttatacatgttacaaagcttgcttgaaggctataacaaaagatttcaaagggtttaacaaattaaacagatactaaatttgtgtttattacggcccattaagaacccaattaagagcgatattgggctaagactgatattttaatattaaacctattacggcccattaatagcccaatcaatatgtaaacatatgcgtcttcgttccatgtctccaatcttatttcttcttacccttttttccaaaatccagaaaccccagagaaagcaaaaccgcgagctctcatggcttccggcggcaaagattccgatcgtaccttagggtacatgacacggaaagatacagaagtcaagcttccaagacctactcgtgtcaagaacaaaactccggcgccgattcaaataactgccgaacagatattaagagaagctcgagagagacaagaagctgagatccgtcctcccaagcaaaaaatcactgattccactgagctttccgactacagactccgccggagaaaggaatttgaagaccagatccgtcgcgcgagatggaacattcaagtttgggtcaaatacgctcaatgggaagagtcacagaaagattacgctcgtgctcgaagtgtttgggaacgagccatagaaggagattataggaaccatacgctttggctcaaatacgcagagttcgagatgaagaacaagtttgtgaacagtgcgagaaacgtttgggatcgagctgttacgcttcttcctcgtgtagaccagctttggtacaagtatattcatatggaggagatacttgggaatatcgccggagctaggcagatttttgaacggtggatggattggtcaccggatcaacaaggttggctc

SEQ ID NO: 50308 - DNA, 622 bp, Arabidopsis thaliana columbia
tccccctgaaattctgccctcaaaacattctttctgcattttggtttttccttttcagagttgagcgacgaagaagttgaagatgtgaattttaaacaggtaaagaaaaacagatcaattctctgtttccattagctgtcatatggtcatctcactgtagctttggatataggcctggctttcatatttctggagaagagctaaaaaccatgaaatcgaatctgatctagtagatgagcgactccagtattggataaaccaagggactcgatctgccacatcacaagatgctgtcgatggtacgctctaaactcactctcattgttaacgagatgtatccaagaaaaaagagttttaattatgtgtttttatctatgaaacggcttggtatataatgggtgtgaaatgcagttgaaagagggcttatggagctgaggaagctgaacatagagtcacagttatggcaaaaatcaaggaaagggcttgaccatgaatctaacccttctcatcttgaactttccttctgattcccgcttcttctctaaaaagagaagaactatttattttcgcatctttttcattttcactgattttaggagagttgattattagcatgtgatgt

SEQ ID NO: 50309 - DNA, 111 bp, Arabidopsis thaliana columbia
aagccaagggtatgtcctaaacaaaaaccatactgaaactatgtgttgttattcaagccttgaagctacgatacttgttccactgcagtctttaaacaaaaagttatgaca

SEQ ID NO: 50310 - DNA, 484 bp, Arabidopsis thaliana columbia
actttgagcttttatatgggctttagtaatggggttttatatgggtcttcatatgctgatatgcatcgaagcgacgccggagtgtattgatctcaccggagttttcaaagcgtttcagggtttaactttaatcaaaagaaacaaattttaagcaaaagaaatagaggaactacaaaatgtaaacaccaaaactgaataaacttgtgacagaatcttatctgccttcattatgttcacatcattgtgctgaagcaacaagagcattcttgatctcatatcagttcaccttttaaaacaagtgaagcatgtctaatagctctagagactctccaaatctggtgttgaacattttcccaagatgcttttgtgtttagcttctttgcattgtcaattgcatcatcaactccagggaatgatttcgatccgtagtcatcgtacttcgatggtccgtatatcaaatgcttgtaccatggtctttcagaga

SEQ ID NO: 50311 - DNA, 870 bp, Arabidopsis thaliana
tgctttatatgagaatttagaatttcaataagattatataatttcagtattacctattaagagttttcttgatattggctaaattaattaacagggttacaaatttcagcctaatatagttattaaaaaaacgaatcaggaagataaatcccttcgttatgcagcagacacgacgtaacaacaaggcccgcgagtgttttaagctctagagtagacatttgactgttcagggaatcttgaagattctcttcagtttcaataggagcttccatttctctgtcgacatttctttctgcaattgttattggttttaatttcgagcatttgttttgggtcagaataatgagtcaaagaaaacgtagatgggaaacaacttatcttatccttgacttaccatgtagtcagctttgagtatgtcgatagatctcctcgaaatgtgactcacaagctcatcttccatgtcaaaatgccttccaaacatcttctgttcttcgcgatttgaagcaacaatctgttatacaaccagagaaaagcatcaagttgaaacctcaacaacttttgtctctctctctctttctctatacaaaggttgttgaagggaatgatccccttattaccttaatcgccacctcgtcgcccttctctgcatagtcaacaggcttgtggttgttctcaatagaggcaatgcggccaatatctgtgaactctctgcccgggacgcaaatgggggttccgatctaaaacaaacaagacgaatgttaaaaggattgagaatccttggacatgtgagcaagttaccgagaatatagcagagtaagaataggataccttaagtataccgtcgtggaccttaactccaaggattattgg

SEQ ID NO: 50312 - DNA, 529 bp, Arabidopsis thaliana columbia
aatcatgacttgccacggcacccaggccaagctaaaatattaaacggcaagcgtttctttacttaatcatataaacgacacggttttccttctcaccgtcacctcgaatagaaagaaaacgacactccacgtcatctaatttctgttatgatttttttattaaaagcccatctcatggcccattcaaatctcttttttttttttgcagcacccatgcaaaatctcagtagagcacacctcgattatagcttcttcttctagtttggcacaattgcttttttgtttcttctgaaaatgtctctttcagaaccattcaattaatacaagcataccacgttttcttctatttcgagaatgcgtgaagaagttagcaattttaaatgggccaaatcaaagagtaattaatttttgtattcatataaataagggcagaagaagaagcaactaacatgagacacaaggtcgcttctctcttgaggaaatttccgggaaagtcacggagtcggttatgggagcccacgaaaaggat

SEQ ID NO: 50313 - DNA, 841 bp, Arabidopsis thaliana columbia
tgtggtttagtgtgctaagtaatctgaggagtccacttctaatcgatacaagtcaatagtcactgaaaatagtcaagttctaatcaatacaagtgaatacaagctatcaaagctatttgaaactcaattcgatacaaatgaatgctcactatcaaagctatatgagactcaattcgacacatgagaatagtcaagttcaaagctatatgagactcaaaatcgatctaagaaccacagaaatcgatctaaataacatacttgtcaaagagaagccactgaaatctttgagaaacgcggatagcgaaaccccacatcgaaacccctaaatctgagaaacctgaaaatcaaacgctaaatgtgattaaaaccccaaatcgaaactcaaaccagacaaatttcacaatgcaaaccctaaatcgattacaaaagaaacataaccttctcgatttagaactagatctgtgactgagaagttgaagagtaccaagagagattgaggcgttgagcaagaacacgaacagggacgggagagagacagacaactgaagaacacgaacacgaacacgaacagagaaaattgaaagagagaattcaaagagagaattgaaagagatgaagaacagtgagatgaagaacagtgagaacacgaacaatgtttttttgccttagaaaaaaatttcggggttaaaagtcaccaaatattttattctccagcgagcaaaaaaatttcattccgcgctactatatcaagtagcgttttttgtagattagtgctatcgaataataaccctaatctaaaaatattgacctgcgtcattttatttcccggggtaagatagta

SEQ ID NO: 50314 - DNA, 643 bp, Arabidopsis thaliana
tgactagctagtactattatacaaagtgtggtacagacagagataaggatgtctaagtggcgcaagaggcgcatgtgcaaccctcaccacaggtgcagcccttggcggaggtttgggtttgggtcttggggcagttgcaggggttgcatccgcagtgctccccacacgggcacaccatgtgcccttgatccccagcagatgcttctctcatcctgcacctacatggattggaaaccacgttttagaatcccaacacatcaaaccctagagcatataataaaggaccaacctgcaggaattcccaccgggacagggagaagggcagccacagctatcgttgcagccagcgacagagcttcctttgcctgtatctgccattttcgttttcaatcttaaagtccctctgccacattcagatatatatagacactgggcagtgcaaaaggatacgtggtaagtactatgtaccatgtggctccttctcctcttacctcagtcgtgacaaagcatcctgaattcaaacgtgctacgtaaccaacaacatcatcccaagagtcgttgtttggtttatcaataaattttctagttgaaaaatattatcaagcccaacaagagcgtgcttgttccagggatacagaatcaa

SEQ ID NO: 50315 - DNA, 717 bp, Arabidopsis thaliana
gagcctctctttaattgtcctataaatataagtctctcttgcaagacttttgaaaccacaacaaacacaaaaatcaaaaggggtcatttactatcttttaagagacgacatatatagttctcgaccaagaaaagaaaagggggtgacctgagttcttcaacacataacataatggccggagttttcaaaacggttacgtttcttgttttggttttcgctgccgttgttgtcttcgcggaggactacgatgttggtgatgatacggaatggacgagacctatggaccccgagttctatactacttgggctaccggtaaaactttccgtgtaggcgacgagctcggtgagttttattgttcttatagctgaaatatgtctttgtttttcttgttcttataacagtcatagttatgggatcgtgcatggatcatgtcggtgttgttctgtctttctttctatattcttatgaacatattttagctaaaaaagggattaattgagtttccaccgactgatgttgatattcttattacagaatttgatttcgctgctgggaggcatgatgtggcagttgtatcagaagctgcatttgaaaactgtgagaaagagaaacccattagccacatgaccgttcctccggtcaaaattatgctaaacaccactggaccacaatactttatctgcaccgtcggtgaccattgtcgttttggtcaaaaa

SEQ ID NO: 50316 - DNA, 467 bp, Arabidopsis thaliana
actctagagatattgcagtgtcttgatcacccgtttcttccgactttgtatagtcattttgagacagagaagttctcttgtttggtgatggagttttgtcctggtggtgatttgcatacactaaggcagagacaacccgggaaacgcttcaccgagcaagcagctaagtaagaaactttttctaaactttctttatctaagaatctagttttgtgcgtttatataaccttagtgacttgctgttttgcaggttttatgtcgcggaagtgcttcttgcaatggaatatttacacatgcttgggatcatttaccgtgatctgaaacccgagaacgttcttgtgagagatgatgggcacgtgatgctttcggattttgatctctccctgagatgtactgtgagcctctctatagtcagatcagctaatgttggatccgaagctttgtcgaagaattcggtttcttgctcg

SEQ ID NO: 50317 - DNA, 708 bp, Arabidopsis thaliana columbia
  unsure (1)..(708): unsure at all n locations
tttactgcaatccatgttcaatatcaccaaattatgcattcatttggcatacagtaaccaaaaacgattttgtggcactaacatattgtgaagggacatgtattacggtactacctgtccgttagaccagtatgcttcgttgaatttgggagacaggttgaaaaatattccaatttatctggtgaattaagcactcctacagcatctaacgatgtttcagacccacgattatgcaattgatgtactttgattgcagagtcaaatccagcagtaacaagaagggatgagttcggatcatacaaacatctccatatgcctcttccactgtatagtaaacaataacttattatcaataataacataaaagagtgatgtggatagtgtgatcgacaattacaccatgtcaccacttacatatgttcttttatcacttccagctgggtaccatccacgccccagacacggcatgtacagtcctcaccagcagtgacaatcaactgaaatagaaaaacttccactttcaataatctataagtagaatattcaatgtgcgcatcaatggtatatgatcatatgtaagaacagatttatacgtttatgcttagaaattagaacaatgacaatatctctattcatcagaatctggctgataagtattctcacctcagnagcgctgaaattaacatattttaaatgattttacgctcg

SEQ ID NO: 50318 - DNA, 816 bp, Arabidopsis thaliana
gaggaatgcaatacacataagtgtcaaaaagcagacaaaatggtatcaatatctttgctttaaccacttttttttatctggtttcttgactctctcatattgtgaacataaggtggtatgcaaagagattcttgcacccggacattgtagcacgatacgattatatattcatatgggatgaggatcttggagttgatcactttaatgcagaagagtgagtttctcttactcttctcacttccatttaaaaatttctaactatgtttgttgttgtagatacatacacatagtgaagaagcacgaccttgagatttcgcagcctggtttggacccagagactgggtttaattggcagatcaccaaaagaagagaacatagtgaagtccacaagtatatataacggcctctctagattatttttgttacattacaaaatggttctgaatatggcttgaaccttagcagggagacagatgagaaactcgactggtgctctaatcctccccggcctccatgtgctgcgtatgtttcaaaaaacgtctctatcaaactcaagtttcagacatatttaaaccattagtaacttcgttatgtctttaataaaaccccagattcgtggagataatggctcctgtattctcaagagatgcatggcgctgcgtgtggcatatgatccaggttacacttactttattatctatctggctcttcatatcttcatataatgtctccttcttgcacctaattgtatatgaaccaaaaacagaatgatttgcgttacggttggggtcttgactttgcactgagaagatgtgt

SEQ ID NO: 50319 - DNA, 555 bp, Arabidopsis thaliana columbia
aatcgaatataataatatatgaagaaaaagatgaaagtgaagagaaaactttgtgtacccagagaatctgattttgccacaaattcggatcgatctcgagctcttctcttggcctttcgtttgctttttgtgcgatcgaaagatggttgcattgcacgtgtaggtgtaatatatatccaacggctacggttacacgttactaatcgtttttattaataaaattaaatatatatactttactaatgaattaagtatatactgtaactggcaacagagcagattactagaaacgccgaatgatgtcaccaattttctttaatatattcaaaggtttgctttcctttttttttttaacacaaaaccacaaattgaagaatgattaaaaaaccagatggaggagattaaggagtactggaaacaaagttggttaacttaaaccggtatcttattgcacataaccaatttgtgtagagtgtaccactacacaggcttacatatatagatcacaaggaaaacagaagccaccaatgatacgattgagctaggaagcaatgt

SEQ ID NO: 50320 - DNA, 499 bp, Arabidopsis thaliana columbia
aatcgaaagttagagaatttagtctccacaaaaccaaattttgtagtttattattaggttaacgtcataaacctaatgccaaaccaaaaatctagtatactaaaccgaattgcaaccgattcaatttactctccacatcatacacttctaatctctctgctctagcttccatgtctctgattagctcttcaagcaaattggattctcaaacccataggaaacttctgaattatcttggacagcacccatacgtgcatcgtaaacctctacataactcaataatgggtatctggttcatgagtttaatgagataatgacgaattgctcgaaatatgacaacaacataggcttgtagctcagagtcatgtatatgacagcctaggaagactgacagagcagctcagagtcatgtgtatcattcgcgtacaaattcatcatcgtactatatcactcacaagaagctagctgcgatttggttctagcactatgacttgaggat

SEQ ID NO: 50321 - DNA, 522 bp, Arabidopsis thaliana columbia
caaatgcttttattaaattatttattaaaaaagactcaaatgactaaactcaaataaatgtaaagttttgttaacggataatagcaatgagaaaacgaaaattaaaattaaacaccatgcatttaaacttcattaacctcattaatggctcagtaggatgaatgttaaattcttatgtaacgtttaaaaaaaaaaattgttactcagataacgtttatgttgcaaacgttcttctataattattaacatttatgtcagaaataaactcatgaattagttataatctacttttctgatataaatagcaaatatatgtattacctttttatcacacaacacacatatatttacaagtactttcttctttttttctttcatttttttaatttctttttttattttaaatacaagtacttttgtttttttgagaattgaaggtactcaattactcaattatataattatttatttgtcgttttcaacttaaatattttgagttaattagtttaatattttttattt

SEQ ID NO: 50322 - DNA, 485 bp, Arabidopsis thaliana columbia
gattcataatgatggtaggtaaaaaatgtatatatatctttggctaaaaattctggtaatttaattcgctttttccccaaattttaacctctctctattcgtggtggtcttcgaacaccaactctaacatcactttcagtcctccgtaatatttcattcatcccatttgtttgaaaaatcttcggattcgccccaagattcgtcaaatcctgcatgattttatcaaaaattaaaattgaattccaactgccggtttagatggtaccgggttcaatttgacttaccatatcttcttctgttttcttgtgattcacgccagagaacaacaacacatcagaggggtccagagaaacgtgcggcctaagaaacggtttgtcttcgtttatcgttaacccgaaagtgttcttagcaaaagccatgctcataccactcacgtggctcgcagatcctggctggatataagtcagcgttgaagctacgtcatt

SEQ ID NO: 50323 - DNA, 572 bp, Arabidopsis thaliana columbia
atcatgatttacatggaaaaacttgaatttctcaaacctaacatcaaaacaacctatcacatcattcgagctgtcctgtgtatcgtaagctatgtaatacaaaactccattaatgcatatcgggctttgccacaaggacgataccttaaggaactttggatactcctccacttatcattttctgttcctaatgtcagaatataatgattgtctagaatggtaaagaaccaaaacctttgaattgctttgcgaatcgggtcaaaccctaaatcgccaaagattcctgacggttgaggtggtaagatcgcatatactgtcctgtgctaggtttacatatcacacacacttcatagttaccctcttttgacatccacacagtacgtaaatatatcaaaccaaaagcatagctagtcccgtgatgttgatgttgttttatttcagaaagcttcatatgaaaatcagcggctacttcaagagatgacttctcatatggattcttaggctgaggcgacgagtagaagctccacgtaccgcctcgaacgatcccgagtaagagacgtggattagatgag

SEQ ID NO: 50324 - DNA, 546 bp, Arabidopsis thaliana columbia
taaggaggggggaggagaaagagaaggaggaggtaattgaggctttggaaaaggaatcaccaccggagaatctccagttggggtggattgaggcggaggttgaggctgaggaggtgaaggaggtggagttatagaaggtggaggggaagaaggaggcgttggaggtggagttgtattaggaggctgattcggtggtggttgagcagctgttgccggcgggggagatgtttgtgtgtcaggggatgtaggagaaggaggtgaggtggctggaggttgtgtcgtctcagaaccgccaatgattttctgatcagtgaatcctccgacatttgttggttgtgaagctacaaacggagatatcgtcttaccgaataaatctgcttgttgctggactttgtccatttgtcttcaccttgtttaatttgcttctccttgtttctttttacatgtttgtatttgatcttaaagaagtttcttgtggaacaagaaaggacctaaaactttgaaatccaagccaaactaggtttaaatcccctgagatctagaaat

SEQ ID NO: 50325 - DNA, 649 bp, Arabidopsis thaliana
taaggtcaacaaatgatctaagtacctgcacaacttgatcattctctgaaatacattttgggttctgctcaaccttcaaaatttgaattgcagccccagtggttttccgcatttccgaaacaataacacctccttttcccagcacacaaccaatctgacttgttgggacaacaagccgtgcagtgatagatgaccttgggccattatctaggattttgttagtggcaagctcaaataatcttgaaaaaataagcataatcgctttctgggctggcgagctttgacattcagggttctacatgatgaacaagcaacaattatcaaccaaggatagtaaatagatggaacagtactgcataagcatccatgaaaatgggaagaaatagaaaacaccaacctctgatgcagttactgcaatcagacgttcttcacaatcatcaagtgtattcccacatttatgaaggcacctgtttcgctatgaagcatcctgacaactttacctccagtcccgataactccgccagcattctcagtggaacaaagtatcttaaaaaccacatcttaggttcctacttccacttctgatggaggtggcttcatggtggcagtgttagcattgaagcagcgtagtgaagctgtgaggatgtgt

SEQ ID NO: 50326 - DNA, 544 bp, Arabidopsis thaliana columbia
catacacataatttgtaataaaacagccagccataaataaattggctccttattggacaatgatacttaaggaaccactcacacaaccatgagtaggcctcattagagtaaaaaagctcgacgagtcccacacacagataatttgtaataatacagcaaaccattagggctccttattggatagtaataaatattaacgagccacacacacaacacaaatcttgacacgcattaagctgaattgaccgcatagaagtagagatcatcagttcgctcgttggtcggaagctttccgccatgcatgaggaggccattctttccatcgacagtggcagcagtataggcagtccaacctcgtggtatggctggtgcaccttcttctcccaacttttcccacaccagtgtctcggtgtccaacgcatatccctcattggacagcgtctcgggaccataatgcccattgagatcaggccatacctcacctgcaaatattattatatactttcccactaccgcatgggcaaacacgctccttgcggaaggt

SEQ ID NO: 50327 - DNA, 565 bp, Arabidopsis thaliana columbia
gcagtgtgctctaaagcatgaatccatggcagtgaccatactaatggtgactgccaatgatggatgggagacacagtgcactggcaaactcacaccgtttttaatcaacctataccattaaataacagcaacttatacctgtctgatggcgcgctctgcaagcggtaacgcgtgaaggtgctggctgggatagcgattttctagccagtattggtcagcagttaggaacggctgaatcccttgaactggggcggctggcgaatgtgaatccgcctgaattattgcgctacgatgcgcaaggacgccgtctggacgatgtgcgttttcaccccgcctggcacctgctgatgcaggcgctatgtaccaatcgggtgcacaatcttgcctgggaagaagacgctcgctccggcgcagtttgtggcgcgcgcggcgtgtattactgttacatgcgcaggttgaggcagggtcgttatgtccgataaccatgacctttgccgccacgccatatgttgttacagatgttacccgcgccgtttcaggactggaccacgccgctattgagcga

SEQ ID NO: 50328 - DNA, 566 bp, Arabidopsis thaliana columbia
  unsure (1)..(566): unsure at all n locations
aaagacgtgtcgttangtcattcgtcgtctagaataaggacagaaaatagggatggaagaagctagacagagaacattcagaggtaagcgccacggacggatgatggagagagtagtngacgtgtggctggatgggataatgagggaggacatggcgagcctattgaagctgggaggcagatcttggtgaaaaggancatgttatagctgcacgatatgaggntacggatcgcatgggaaatcgagaagtggatcagagagagtgacctataggatcggacgacagganttttcgtggaagagctagagaaagtacggaaggagctgaaggggcattcaacggtatagacggaagaggaatatgaantaaggcgtagggtaggcgnttgcgtctatagatcgccatgtagcagaagatgggntagtntgngatgantgcgaagcgagggnctaggtgttagaaagtctatatgggccagtanacgggaactggagggggaagaagtgggagttagtgggtagcggcagagggagggcggggagggttagggaatcttgctgataga

SEQ ID NO: 50329 - DNA, 285 bp, Arabidopsis thaliana columbia
  unsure (1)..(285): unsure at all n locations
tataccaaaactaacgtgctttcctcctctacggcttcaggcgtagcgcacgtatagaatcttgagaacaaagtccatgaattgaacatcagcccttcgctgcgcgagtgnggttaccttgcttatcctgtgtaaactccttgctcagcatcacataatcgaaaacatcatantgttcatccacaacccgtcagtctcctttatggtatacaatcagttcctcaagcggtttctactgttccgtctttattacccccatccgcgcatgaataaggtaatgattgt

SEQ ID NO: 50330 - DNA, 514 bp, Arabidopsis thaliana columbia
taatagttaacctttgactttatatttataaatttgtatctagatctagatgactaataaagacttaaaagttaaagctcatatccaaatctaaatcaaaaccatctaacaaatcaattcttttgatattgatttgatcaatatcagaaaaaaaaatgttatacgttattttttttctatattgaattattgacaataaattggttcagaaagttataaaaaaaaaagaagacaaagtaccataaatattttccatctaccgaaattttttaaaagtaatgtacttgtcttgtcttcttctaaggttgaagagcttaacataaacacaaatcatacaaaccaataaagtacaacacgttgaacagtttttaaacgttaatgggaagggaaaaggcacgtttttcttaaccctaaacacaggaaaaggtgactaacaaacccttccttaattgattcctaaggtacacattacacatttgcctcgagagagttctcagagacagctactacagtt

SEQ ID NO: 50331 - DNA, 1028 bp, Arabidopsis thaliana
tcaccagccttcagatttcacattttctgggttctcaaggctgttgttgggctgcacgattttgctcttggtcagcaactccatgctctgtcagttactaccggcttctccagggatgcttctgttggcaatcaaattcttgatttctactccaaacatgaccgtgttcttgaaactaggatgctttttgatgagatgcctgagttggattttgtttcttacaatgtggtcatctcaagctactcacaggctgatcaatacgaggcatccctccacttctttagagaaatgcagtgcatggggtttgatcgcagaaacttccctttcgcgacgatgctgagcatcgctgctaacttgtcatccttgcagatgggtcgacaattgcactgccaggccctcctggcaacggctgattcaatccttcatgttgggaattctttagtagatatgtatgcaaaatgcgaaatgttcgaggaagctgagttgatattcaagagtttaccacaacggaccaccgtttcctggactgccttgatctcaggttacgttcagaaagggcttcatggagctgggcttaagttgttcaccaagatgcgaggatcaaatttacgagcagaccaatcaacttttgctactgtattgaaagcttccgctagtttcgcttctctgttgctggggaaacaactccatgcattcataatcagatcagggaacttggaaaatgtgttctccggaagtggcctggttgatatgtacgccaaatgtggttctatcaaagatgcagttcaagtattcgaagagatgcccgatagaaatgcagtttcctggaatgctttgatttcagcacacgctgataacggagatggagaagcagctattggtgcatttgcaaagatgattgaatctggtctccagccagattcagtcagcatcttaggcgtcttaactgcatgtagtcactgtggatttgttgacaaggaacagaatattccaggcaatgcaccaatctatgggataccccaaaaaag

SEQ ID NO: 50332 - DNA, 598 bp, Arabidopsis thaliana
tcctcatttcttcgatcgacaattggtagaatggtcgtaaccactcaaccaatttgagacgaaaccgaagacattttttgtgtaaataagaaacacataccactgaagaataaatactcatggagaattccaaagctgtttagttcacaggatcatgagctccatttgttgtgtctttctcagtttcttgtgcggctgaggacgaaccgtgttctgtgctgaccatatcactgctttgctgttctcctgctgtattggaaatagccttttgtttcagatatgcttccagaggaaacgctgcagcttggagaagcctcatcatgcttactcgggaagcccccgggtctgagttcaagtcgatgttttcccctgcggctagttcaaccgctggaatgctctccacttctgtctcgtccctgcactctgactgtgactgcgcctgctggcttgcctgtcctgcctctcctttgttccgcttccgcagcatgagcgtcctgaatcgtctcttcactgcctcgcacacagtgcaagtgcatgacggcttgtgtttgccttttcagctcggtggttggctgcagacgatgcacgaacacctgcc

SEQ ID NO: 50333 - DNA, 580 bp, Arabidopsis thaliana
gtattgctttgtaaccctataccctggtctaccgattttaactgttttgcgaactgagactttgcgcttatgtggctgcagcggttgcggctgagctgaagcattcttagcctccaaggcagctctctttgccaagtttgtctgatgcttcttaccttgagtatgtaccaagtagtttccttcgttgttatgcaacgttgcacatagtctacactcatagcttccatagtgattttgtttgaaataaggatcttttgcaatgtttatggtgtcaagagcaagacgacggagacgatcacggcgatctatggcctcgttctagccggtggcggcgcctccgctaccaggattcgacccccacgctctatccatagcttataatatcggtagactcagctagagattagcagagtaattaggaaaccagcttttccatgtattctcatcaaaatgaaaatgatcacttgttgagatagatatatagtccatagttccgtttatagaaaagccaaatcaactaagttcatcgggttccttttgatgtcttgtttaacgtgtgaaaccaaacccaccattatta

SEQ ID NO: 50334 - DNA, 772 bp, Arabidopsis thaliana
cacaaaaaaaaggagaaaactattcagtatgaaggaaagaaagagttatgagtacatagacaaggagttgtaacactcacctgctcataagatgacatgaaacgatgtcttggctttatgttgtcctctatctcaggatattcaatctgtaaaacattgtttgaggagtaaacagacacagtgagattttactctggctaagtctctaatgatgatcattgaagttcaacaataacaattagatgcttacctggaacagaagagatctttgttgcagctcgggatcatactgttttgtaacccggtaccctggtctaccaattttaactgcaagaccatacataaaatggagttattaataaaccctttaaagcaatcaattaagtaaaatctatgtactcaatagcaaagatatacaattttgctattacttctagacaatcactttcccattatatccaattccaggcctaggcagatttgatatcaacaatgggaataaagctgtattatgattatagaaaataaaacaacttattacctgttctgcgaactgagacattgcgcttgagtggctgcggcttagtaggagcatccttagcctctcgagcagctctctttgccaagtttgtctgatgcctcttaccttgagtatgtgccaagtagtttccttcattgttatgcagtgttagacatagttacactcatagctgcacaacataaaaacacaccaaaaatcaaattagtggcatgaggggaaaattaaaaaaag

SEQ ID NO: 50335 - DNA, 1146 bp, Arabidopsis thaliana
tccgcttcgtaaccatattcatcagttctctcacatgtcactctcgccactgcacctgtccacatatatcaaacaaaagcttagacgagaccttgaactccaatcctagtttacaatatatacatgatgagatttaccttggataggtgtaagcttagatcctcgtttgcagtagatgagaccttggactccgatcatcgaggaaagcagttccccctcggtgattgtggctattccggcggcaaacagagacgagagaagcagcatgtagggaatgtagagaatcgaacaagtttgggccattttttaaaagtttaattcaatatttgaatatatgtctaaatgtgtttcgttgatgaatgaaagttgtaccatgagagttatatagggttttagcgataggttaatatataaatccaaagttatatgagaataagggatctgacttgagcgcacgttttagctcgtgatcctaatcattgcattcttatgctcctaaatgtgacttttgatatagtataggacgtgcagagacacttctttttttttttttttgatttttaaacatcagtgtctgtttcaattccgttcgatgatagagctagcgagcctcttcttttcaccagaaaaataaaatcgctatataccttttctctttctaatggtaagctttgtacttgtctatttgagattttaaataaatattaaatgaaagcgtttactaaatacttaccattttaccaattacgtggaaaaaaaagtactcaccatcaccgcgtcacgactaatctgtaggcaacatataagacgaatagaagaaagtcccagacccagaataatgttattaatgcatacgtttttcaacttctctttactcaaattttaagaagctttctaatgggacggatgatgaccgtcaatgaaatatagttcttaatttctaatctacaccaaaactgtcaaagtttcaacggaaccaattgggataaaacaaaaaatattatctttaaataatttgttaaatctaccaagtatttctttaaaggtggttttaaggtaataatttatgacagtaatggctaaaaccaatctttttcaatcagacacatattggatgaaagattttcactgaaatgtaacgatttt

SEQ ID NO: 50336 - DNA, 1046 bp, Arabidopsis thaliana
cagtttataaaaacagaagaattattcaacaacaaaactaaaaccagagagggacaaaagcaaagcagaaaccagagagaaaaatccaaagctgcaataaccttaaacttgtctttaagaaagctggcgcctcttgtaacgcaccatcacattgcctttaactccaaccaccatagcgttccagtcaatctcagggaacggtgaaactagctcaagctcgaagttcctcaacaaatgactccatatggctttgatctgcaggtaagcaaacggctctccaaggcacccgtgccttccccctccgaatgcaatgtacgagaatgcccctgcggctttgtcctcttctcttccaggggagaatctttctgggtcgtaggtgtcggggtctttgaagatgtgcggtaagcggttggcaaatgcaggggaggttgcaacgatgtgaccctttgggatatcgtaagtttttccatcccgagctgtcacgctgaaatcactgtgcgaggctctcattaacatgatgagtggagggtgaagcctcaacgcttccttaatgcagcggtagagaacatccatctcggataagatatcatgatcgatcttgtctccatgtttcgcaatcaggttcttctgctcatcaagagcagctgagaagtactctttgtatcgcatcagataagcaccggtccaggtggaagtgatagagctcgtgtgttgtcctgcaaacagagcagcaatgagcaaaccagtgacttcagattcggttgtctgtctaccatctttgtactttgattcgatgaaacactgcagcatgtcgttctctgtttttccagagcgttttctcgacccaatgatttttgcgaaaatctccgaaagcttttctcgggcacggtcacgacggcggtgagctggaattgggagatatgggaagagaacactgatgggaagcattccattgtcaaggtcatggaacaaagcagagacatcatcaaaaagctgatcacgaacttctcgacccagtaaacatctacttgcagtcaagatgatga

SEQ ID NO: 50337 - DNA, 908 bp, Arabidopsis thaliana
agtgtgctctaaaggacataaggagcccgatcaccttttgtcccacaagcatcacaaacgaaggagatcaatcttggcataagattgagtgtatgctcatgtaccttgagatttgaaagagcaactggtggggtttttgtttttgcgcataccaaatccaaattgaacttacagatatcacaatgatagatgaattttccagtgtcttctccgcatagatgacattttggatcagtgtaagtgggtgctccttcggtgagaagcttgagagggtgtttggtgtgacaaggatgagtgatctctggtgagtcaattactagggcagcgcatacccacccaacgaacaaccgacagcaaagacagatatagccatctacgtggttgtcataacaaacatcgcaagtcatattagtcgcaaaattacccatgaatagagggtggtggtgccacggcatattcagatcggcttgggcacacatgggatcaataatgcaatcgatatccacattgagtttacaatctctgcaatgataaagaagacgcttggtgtttttaccgcaaagatgacatttgggtacggtatgatctggagctccagttgtgagaagtttaagacaatgaccaacatgagaaggatgttcgaatatctctggcacgacttcgaacaaaaacgtacatttcttatgaacagtaaacttgcattcaccgcatgagtaggcatcaccataggattgatcgcaagcatcacattccaaaccatcatgattcttaacgagggatacacgatgcgggtgtcgttttatcttgaaactcatgacggatgcaggtagcagaggtggagagaatggaaattaatgtttgggggtaatacactttggttcgtgtaataatagtggataatgaagttg

SEQ ID NO: 50338 - DNA, 507 bp, Arabidopsis thaliana columbia
ctaaagccgagccgacgagcacggctgctactatccatctgcgcttcgaccccgtggggcacgaagaaccgcccagtctaggcacggtctggagcaagctgcgtgttgcgacttactactccgtacgcccttgggataactatccgactgcttcggtagtttctgcatcggacatgtcgggacagggtgtataccaggagatcctgccattatcgagcaggtgtgttgcctctgcgcaatggactaagcatggcatggattcccttgcacgtcgatactctctccagtcagcttcttctgcagagtctatcacagggccgtcggctcagtggtctggagacaactactatacagcctcggttgtcgttcctgtctctctaccgacaaacagagcgtttgttccgacttttcactcgtgtctgatctctcgcatttacatcctggagttctgcatctcatatcacaccccgaatatgaacatcatcacgccgacggtaactctgaagg

SEQ ID NO: 50339 - DNA, 1879 bp, Arabidopsis thaliana
tcccgtttttatgtttgttttattttttgcttatgtgacatgtgtaagccatagactcgcacatttttctgctttaccataagattaccatgacttcccaatttaaatataaatgatgaaaattcaagaaagacctaatcacattgatccttatttttcttgtcaaatcatttggtaaatctgtttatatatagacatctcctacttgattctgttttttagatctcatgttcctaatccaatgctagactcggttctattgtctttgtgcaagacagttggtcagcatgagtagcagggctgatccgatatatctaaatgccaagccactagctaaaaaaatcatgcctctttattaaaataaaaaaaattcgtagaaacacaaataagattaatataaaattcataataaactatataaaaaagaaacagagactaatttcatatccaacaagacaacaatctaactatctaagacatgaattattattatatgcccttgatccttcgatccaatataagcaaaagaaatcacatgtcctttacggcctttaccaaattaatgtcgattatcagatttatttctctattaaaagtacttaccgtatggtcatgggtggaggctagcatttcgaaaaccttgcagtgtttctttgagtttccagagttattgataattaaaaagtcgatatagttactacttgcaagatatcatgcatggtctcttctgttggtttactagtttgtaattttcttatgtatattcttctatataccaaataggcaaaaatatatctacagttctttgaaagtaatctcatcatcatcatgaaatgaaaaaaacaaaataattctaatcatgatgactgatttcaaacattatacaatgtagtgatacgacaaatagaaattagtactagtacatattttaatagtatgtcaacaaaagtctcaacctcgtggctctacctccatgaagactcgtggcaaagatagagaaagaggtcatatgtgttgcagacatatgaaaatgaattctctttattatctctctgattcatttggttagttcgattcttcacagttaaccatttatttagtatttcttccgatgtcgatattatacgcgttggtggcgcgtggaacggtggttcttgcggagttaagcactacgtccacgaacgctagcacgatcgcgaagcagatccttgagaagatccctggtaacggcgacagccacgtgtcatactctcaggatcgttacgtcttccacgtaaaacgtactgatggcctcaccgttctttgtatggctgatgaagacgccggaagtaagtcttttgagcttttagtctgttactatgataacactaatactcaatattttgttccttattttggttaatgatcaataaattaatcattacttagtttagaagacagagaccagattcttgaaatttgaggttttatgaatttggtgtttatgatgagtaacaacctttgagaacagagacaatgaaataagaagagtctttaaaatgttcccaaagttgtgaagtagtagagattgagattcttttttctttctttctttagtttgttgttatgtgttaatgtacttgttttgagtgttattttcagggaggattccattttcgtttctagaggatattcatcagaggtttgttcggacttatggccgcgcaattcattcggcacaagcttatgctatgaatgatgagttctcaagagttcttaaccaacaaattgagtattactctaatgatcctaatgccgatacgataagtcgaattaagggtgaaatgaatcaggttttgtgttctccataatttgaaacatatatagtgcaatggttatg

SEQ ID NO: 50340 - DNA, 615 bp, Arabidopsis thaliana
tcggtacccaggggatctaacgtccgccagtgtgctctaaagtactaccaataactcttataaaactcatgcactgagcaattgacaatataccaattataacttcgacttaggctgcatcttttgtggatcccagacttgcacctcctccaaccctcgccatccatcagggaaatatcttggccccagcaccttcttctgtacctttcccgtcgctcctttgggaatctcgccccccgctaccctcaagacagtcggcatcttataacccgctagcaccccccttagatcccccctcagcttctctagagacaacccgcttgctctgtgttcatcttttagcgtaacaacggccgcaacccgttgcccaaactcctcgtcctcgacgccgacaatcatcacctcagagacataatcaaggcctagtatctcccgctcaatatcaagagccgagattttgtacccgccactcttgataatgtcaagcgaacgccgcccctgaataaagtagctctccccatgcaggatgcgatatcacctgtcttaaaatacccatccttgtcatgtgcctttgatgttgcgtttgtatcatggaggtacttggaaacatattgg

SEQ ID NO: 50341 - DNA, 343 bp, Arabidopsis thaliana columbia
ctacttaacttctccttgtcccaacaatgcaaaattgaatatgaatggtgagataacatcactattaatacaatcattaggttatatatgcctgacatttatactatttaagtttgtgcaagataacacgattatatattcgatgtatcggaagtgatgcgtcttatatgatcacaacaccgcaggtgcccgtctacatatcgagatattatggcgtagataacaggtcgctatatcggtgcattgatgataaccgatcaactgaatttagaatgataagtaacgctgccatcgtatgattcccaataaatcggaatggaactaagctttatcttcgcaacaa

SEQ ID NO: 50342 - DNA, 539 bp, Arabidopsis thaliana columbia
tcaactcgactgaggattgtttttaatcagatactttgtaaagataaagacattaagactataatctaatatggtatcaactttatatttgttggcaaagttagagttctgtgcacaatctatgtaatagatacggattaggcttggtcttacatcagctgtagtcatgtaataagaaggttaatcatatacatgttggtgttaatggtgttaacaacaaggggaagaagcctagattatgatgtgccacatgcaagtctgttgttacaaatgtggcctctaggtaaatatgattttcacactaaatttgcagagtatttcacacattcatctctttcttgagactatgtctcccatttatcaccctcgtggttttgcaaaacacattatatgtcaggctcatgtttatgcaaaggttatggataacaatggtggagccaaattgctactgtctgactcaattttctctaagatcattggcgagtctgaacctctgtactttaattgatctgttgataaggtctgtttagaatattagt

SEQ ID NO: 50343 - DNA, 606 bp, Arabidopsis thaliana columbia
cctcccaaatcctcaatttcacggaaaaaaaatcccaatccgtcgtcaattccgaaacgtgtcgtccagatcaggcttccagtaaaccctagaccgagcaatcttgacgacgaagacgacgaagaagaagagaaagctaggaagaagcgtaaacagatggaatctgcttccgcatctcacgattcatcagtaagatcgttcttatccgccatgcctgcacctaaaagctcacaaacactaggtgctcttccttcattgggatcaggatcaggtcgaagatcgaatctcgaaacagaaacaccttcaattgcatttcctcaaacggattcaggtattagtgatcaacaaaaccagagctatgaatcgtttagtcatagtaatagcgaaacggaacaaatcgttggagtagataactattatgctactggttatgatggtggatacgaaacaattcctagtggtagtagtgtgggatatgatggtagtagctatggaggtaatacttggaatggtggtgggtttgaggcaatgccgggattgctgaagcggttgtagctatggatagtggtgcgaggagaggaggagagggaggatcagatgcagaga

SEQ ID NO: 50344 - DNA, 530 bp, Arabidopsis thaliana columbia
cgaactactgggatataggtaattccggttattggattcttttcgctaaagtaaaccggatctcggtttacggtggcaccattgatgctagaggagctggttattggtcttgtagaaagaaaggtagtcattgtcctcaaggtgcaagggtatgtttacatcaaaactagcggatttgatttgttcatttattagctagttatattaatttgatttaattataattggacatggcttcttttgcagtctatatcgttcagctggtgcaataacgttctactaagtggtctatcgtcgtttaatagccagaatatgcacgtcacggttcatcattcttctaatgttcggattgaaaacgtaagaattagggctccaagtggaagccctaacaccgatggtatccacgtacagtcttcttctggagtcaccattagtggcggaaccattgcgaccggtgatgactgcattgcacttagtcaaggatctaggaacatttggatcgaacgtgtcaattgtggaccgggacatgg

SEQ ID NO: 50345 - DNA, 600 bp, Arabidopsis thaliana columbia
cgaaataaccgcttgtcttctctatcgagtccaaagtggagctctgcaaatcctcgggcaagacgacgatttggaaaacgaaattaggttaagagtttagactaatctgaaaccgatattctttcaatttcaatattctagttcgatttcccaaaaatccctcttcggttattttggatcacaggtaaacgatggaggagatatttgctctgatagtctcaatgattctcatagttgcggtgattcctttgttcttttggaaacgtcggagagatgctagatcacgggaggaagttgctgaaccaccacaggtaatttatcattgtttgcgaaaatggatttgaattttggtaatgtctcgttttttttttccttctgggatttgattggttgttcatgtgaaatgcaaaggttcaacctcgtgaaaacgtggcacgtgctggtggtggacggaggatgcgtaggagacctgcagcttctggtgctagctcctctacatccaatgttcaaggtttgtatttgacagcttttgtttctctttgagttttgaggattgagtttctgctatctttgtaatttgaagcaaccttatgtagatag

SEQ ID NO: 50346 - DNA, 603 bp, Arabidopsis thaliana columbia
ccggaaacaatataacagcgcataaagctatcccagtaagcctactatcacaccagtgccgaggtaatttcgtctgtaacaatgctccataggcttggtgatcgaatgatgcaggtacttcacatccaggaaagcaagtgctgaccaaagattccaaaacaaatccctataaaacaagttacaccaaaaacaagattattaaactgcatatttccgcagcataatttgaatctttttaggagatagaatagtacataccccattgtagcgattcagagcatctgacatcatctggcttttcctccaagtgaaagatatgatgttactttctgcaacttgatccaatttattgcagtttgtgaaaatgtatgtgcaatggattttacctgtcaccatgagaaccgctagagggcttccaacttcttccagtgagtcacaaccatgtgcatctaagcacttgaggtttggtggaagcacgacacagatttaagcttcttgcaattcttcaagtcaagccatttcagatgataaagctggctgatgttagcatgcaagctctcgatatcatttccacttaagcataaagcaacaatgaggaaggta

SEQ ID NO: 50347 - DNA, 470 bp, Arabidopsis thaliana columbia
aggatattcattgatataatacatcatttgcatcaaacttaagtacatacaaggacaacaaaagacacctacttgtcgtatgggaaatctgagcatttccagttatggatcacccattgcattgtggtgcaagcggcattcgtctctgctcctcagcctgaacctcctctctttaccacaatcgttacacccaacaaactcatctctatggcaaactttggcaccttgtgatctgtttgatctactgcacttctttgatgattcattgtagtacttgagcaatactgtctttgacaatggaaccttttcgcccccaatgataacccacacattgccttttccacttccttgccgttatacttccagaatgcttctcgactgcagctggtgtcaacttgtctagcatcataccatcaaaactgttcaagtcagtcactttcactttcaaagagagctctaaatgagcatct

SEQ ID NO: 50348 - DNA, 606 bp, Arabidopsis thaliana columbia
tgtggtcacaactgtttgttaataaaatgtttgcctctgaaactcgtaaatgtaacaacctgtgtagattttatgccttgtgaaagcagaggttatatgtttatgaaaaaattgactccgactacgtttaaattttttgaaacccaatatagagttgagtgcgtctctgaactgtgtgtttcaatttgtggtctgttccagtgagtcgtagacatgtttgggggttgagaagggtgagtctaatccagcgggtgtcgtaatgtcagtcaatgtctcgtcaggtcaggtcgtccatgttgctgcggtcgtcagtcaagttgcttctatgcatttgtctctttacttcccttgcgtggttgtggattgtattaataatgcaaaaattgtttatttactttgtcgtcctcgtggatcttgtcttgctatagaatcctcctccaggtccatactgttttacacctaatcttaagtaagttggcacttatggttcattctttgtcactcacctggtcgtttttaccttattattaaaattagaacacttggatacttttgggggggggggggtaatggagtctactaggggttgcactggttgttggttta

SEQ ID NO: 50349 - DNA, 458 bp, Arabidopsis thaliana columbia
accatatttatactaataaggccccagactcttatcaaatgttttagttaccgtctatatatcgatttttgatcattggatatataactaatgttttcggagtatatttcaccttttccacataaatccgaacccgtatttcggtggtaaatccatcgtagagcactagccatatatatgtgccacatcaatgaatttccctctctttgtctttcgatacaaatcgaacaagcaagatggagaagaagacaaaacataaatcacagcaagtcatttgtctacacccgagtaacattccccatgctcatggcacgtgattagtctttcacttctttagctaaaaacgttaattcctcaaagcatctccattgcataacctctcatggatgtctcacagactaaccatggtaaaaatagtttaatcatgattaacattaaagacattaaaaacataaata

SEQ ID NO: 50350 - DNA, 624 bp, Arabidopsis thaliana columbia
ctagaggatatctaatctatattcacattgttattgaccggcagatcgaaagagagttcttttttcttttgcatattgcatatcacgtgtggacaaaagccccatttggaatcttttatgatattatattgttatgttacacattaatttgttatctcaccaagacttctattttcattttgtatccggtaagagtcactcttttgagttttgacttttgactcttcaaaatgtataattggttctcccatgaggattaagtatgtcatataaattccgtttcccaatatatataacttctattttcattgagatatagtataatattattcgtatagaaaattactcaaatcataatgaactatgcatgagtgcatgcatgtgataccttgttttaatataatggaaattcgatatttcaaacttttctcgctatgttgacgttattgtcacatttactttaagatatatcatattttgttttagtaatcttaacaatgggtcacactaaatttagtcaattaaatcatgttggcaactttctccatttgtgtataacgccttttcattcatttcttacacaagtgacttagattgtagaatcacagttagtcactgcatgat

SEQ ID NO: 50351 - DNA, 753 bp, Arabidopsis thaliana
cttcgtcctaatttaacacacaaacacaccagaaacgatctttcctctcttcttcaattatttacgttacaccttcttcttcttcagattcgcttctctttcttttcctcgaaacgattcagattcttctcccactatacaactattggtttttcagttactcaaatcgagaaaccctaatttcataattctgagattttgagctcatatcccaaatttcgaatctcactctgttttttcctctgtaatttctcagatttctaccaatggaaccttcatcacaaagttcgagactttttcttttctgcttcgtcttcttcttcatctctgcttctatcttcgttgactcaaaatcacaagattcttcctcaattactccaccaccaccgcctcctccaccgccactatccttatctccaccgccgtctcctataacggctattgagagtaacaaggcgattcacgagaaacatcaccaccgaagaaagaaatggagacagagaagacaccataaacatccaccaccgcctcctccgaagaagcagaaggtgaacacaggaaagacggtggggcttttcttcgccggcgtagctgcagctttgcaagtagttgttgctgctttcttgattttcaaaagaagacagcttcttcttaagatcaatgatagacactgacagattccaagcttgttgtcacagaaatcgacattgttgaaaagagcttgaagttagagttaagtcaatctcaattttg

SEQ ID NO: 50352 - DNA, 1144 bp, Arabidopsis thaliana
acaatttgttcaaagcaagcttgggtggatgtatggatctgtacgagcagactattcacaggctcaacgagagcgtgttgtgtcccaagaacgtttgctctaggtcagacgtgcaagcatggctcagcaccgcactcaccaacctagacacatgtcaggaagagatgtcagaactcggtgtctcgtctcattccttggagagcattaccattgatgtcattaacaccttggccatcaacaaggtagctctaacattattactaaccaatcaaaattctcaaaaccatcttaaatatcaagcatgttttgaataattcactcgttgttacttgatttttttttgtattttttagaggatggaacaaaacggtaaggagtttgggatatcgaaaataacaatgaaaacactatctataggtgaaaaagtggatgtagtggtggctcaagatggttccggggactacaaaactatccaagaggccgtgaatggtgctggagagaggctcaaaggaagcccaaggtatgtcatacatgtcaagcaaggcgtttacgaggaatatgtcaatgtaggaatcaagtctaataacatcatgatcactggcgatggtatcggcaaaaccataatcaccggtgacaaaagcaagggccgaggattttccacttacaaatctgccacttttggttagacatttctccttaacaacttacactatatatattcgttttattgccacgtaacatattgcatgacagtggctgagggggacggtttcgtgggacgagacataacaatcaggaacacggcaggaccggaaaaccatcaggcggtggctctcagatcgaattcagacatgtcagtgttttacagatgtagcattgaaggctatcaagacacactctacgtgcactctggtcgtcagtttttcagggagtgcgacatatacggaaccgttgacttcattttcggaaacgccgcagctgttttacaaaactgtcggatatttgcacgtaacccaccgaatggagtcaacaccataacggcacagagccggttcaacccgaatcagacaacaggaatcgtaatcgataactccgtggtgaaaggagctccgggggtacagttaggaggcgtgaaacgtatttg

SEQ ID NO: 50353 - DNA, 869 bp, Arabidopsis thaliana
ttcttgattattttgcctgaaaacaaaactatcgataaaatcttagccactacatttgctatgaccatcacttatctaattttgatatcatgtttttgttcatgaccaggaggcaagcacattggtggctgctcaggtacaatctctcttcctttcttacctcaacaccgagatttttctaatatgtaattgagatcgtctttgtgtattttggcaccaagatagatagtactcaagatcttgctcaatgtcttgtgatttttctggtaacttgacctgcatatcattattgttgaacagatacattgcagctgcacaataaaggagagctggaagcaattttagctgaagccaatggaaaaaacggtcagacctagagatttctagagatgaaactggttggtgattcttcatgtttccttattgaagtcgagatgatttgctgtttgaatttactgtctatatagagattttcaataagaatcttgtgtttctttctacgtacaaaaaacagtcaatgagtcatgctgggttctgttactaaaccggagttgctgagtttgatccacactacttggaatttgcaatcatttttgggtggctaaatgcatatttggaaatcgatcttgagattgtaaaagataaaagatgaattgttggttaactttttggtacatacggttttgtttaagattacaaacagacgaaccggtttagagataaccatgtctctcattttacttcttccacctcgtccaatgcgtagttgttggtcgatatattcgcgtaattcccttggcgaaccggacacaacaggatatcgggtcttcgggtcctgacaatttagacaggaatataagatgaaacga

SEQ ID NO: 50354 - DNA, 705 bp, Arabidopsis thaliana
tcataatgcatatggtatgtcttcttctttggctttttctttatttccgaagattggaaaagtcagtaaacaaggaggggcataatagtagtttattacagtaatcagcggcagtaacacaacagccgcgtttgacattttctgaaggaatcattcgtccgtcgtcgacccatcttcttctctccaatggagtctcctcttcttcttcttcttttctctttcttattatttccgatccagtcaatttctcggcttccgtaaaacccagttgacaagaaaaataaaaaagctttatcctttttaccctaattcctcaaagtttagtcctttctctttcgggtttctgaatctcgattcgccatttgatctgatatcgacgatggcagacatcgtcaagcaaatcctagcgaacgcgattcaactgtctgaccaggtggtcaaagccgccgatgaggctagttccttcaagcaagagtgcggcgaactcaaggctaagaccgagaagctcgccggtcttctccgtcaggctgcccgcgccagatacgacctttacgagcgacccactcgccgtatcatcgacgacacggagcagatgcttgagaaggctctctcccttgtcttaaagtgccgagccaatggcctcatgaagcgagttttcaccatcatcccgccgccgcgttccggaagatgtctggtcagttggag

SEQ ID NO: 50355 - DNA, 653 bp, Arabidopsis thaliana
ccaagttatacaaaacccaaaaaaaaccagaggaaaggtttatatattacctttggaaacagaggaatgcctttgaagagacagagagaagtcaaaacagagtaaatgagcacaggtagtgaagatggagcccaaagacaatagcaacagtaaccaagtatcagtcctaaactgatctttccttttccataccaaaccggactatacttcgaaagcataatctgaaagtctccctctgaccatctcctctgctgcactagcatttgatgcaaattggtcggcgctaccccgagaaatgcttgcttttccgggttcaggtaggctgatttccatccgcgacactgaatcgtcaaaccagttattacatcctctaccgggcaaccatatttcacacccatctgccatggaaacaaacaaccaagaatttgaatgaaattgatagtgaacgttttaacttcattacaagaaacagtcataagtaagtgagtactaatcgctgccttacctcctttccccattgagtgttttcctcataagtgcagctcgcgagacgcttaatcatctcaggctctaaattttcgtgaattctctcagattcttcttcttcttcttcctctccatactttcttccacagatcacatctcttctgtga

SEQ ID NO: 50356 - DNA, 1020 bp, Arabidopsis thaliana columbia
atgtgacactaaaattaagttttccctttcttttactttctttgttctataaagtaattattatgagctaatttcaatttcagtttgtattttctaactgattatttgcactataaagtgatttcttgtgtactcataagactcttcatttcattacaatttcgtaactgattagatgataagatatacagtatctcctaagagaaaaaatacaaagcccaacacggtaagcataagcccatgatgatgacggttaatatcatgattatgatttaacaaacataaagagagtttttaaccacaataaagcgacaatccaccaaattctttcaatttggagaaaagttttaatccactagtataatgagaaaaaaggattacaatcaacttttcgacgttttaatagatttaagcaaattttcaaatttcaaggtttccacaaggatatttggtaaaaaatcagaaaatctgtgacttttgcgtcttttggcaaatacaatttcaattattgttttttcaaatatgatttgaccaaattagtcttcaattttttcaaatttaactaagtgctaagtttgaacgatgttggatctctaattcacccaaatcaaactaagccgaaattactgatttgtgggtttcctttctttcatacacctatctccgtgttcaaaaagtaatcaaattgcattaaaaataggttagttaaaaccttataggaagacaataaatattgatataaaattcattcaaagttttaattattctggtgtataattctcttgtaaatataaatccccgggatagaaataatatttgtaattctattatttttcagtttttacatttgtgaagataataagttttgtcattttttaaaaatggtaaagaaaagtgaataaataagtgatagaaagttatagttagttcgtttaaatttagtggcggttttagtagttaaatttagtttaaaaatagtagtaattttagaattaaaaggtggtttttaggtaaaaaaat

SEQ ID NO: 50357 - DNA, 516 bp, Arabidopsis thaliana columbia
cgtataataaatatgatcatcatcatattcttaaaaaaaaattagtgaatactttaagtttaaggtttgttgtattaattaagaaaactaagaaaggcatgtcttttatcttacttattcgtaaaaggattctcataattaattactcagttttctaataatattttcctgtcctcaatttctttttttgtgtcaacaacatacttcttgattcatataattgttttgaactttgattaaatttttggtaggttatgcttgtttaagttaaccctatataatgtattttaaattttacataattcagtcgaaatatttaaattaaagagatttaattaaaaattatttatacgtttccttactataacctaattttgataacttttaatagtttaatttcaattcaaataaaaagttggatattatggatcaattacaaatagttctaatgcctaaaatcacttcacaaagacaaagtttcactaatttggtttagaaattgaggacgggtatgga

SEQ ID NO: 50358 - DNA, 757 bp, Arabidopsis thaliana
tgatactttgagatatgcattggtataacagttgcggttgagttagtagcaaatccatcaataattttaatgtttatagttttgtacactgaatattgattttgttttgctctctttagggttatagttcaattgctgtcgtttgatattgttagatttttgttcgtaatctttgtttcataaagactaatttctcatataaaataaaaataatgtaataatttctaaataaccttccaacgacgtcttctttcaacacccattggtccatcacgcaaccccgtcaccgtcatcttcttgacccgaccaaccgctttccgggtcggtttcttccacgtgtcaccccaattcatctctcttcctcccaaagatatctttagaaacaaacaattccaatcgcgtcgtcaacaatgaatgaataattttgatgtatttgtaaaataatggaagcatcgagaaatcgatcgctcgtcggaaacaaccgatctccggagatgaacgaaaacgacggcgaagatgttgcaggcttcggcagcggtggaagacgtggaggtgtgggataggttgagtaatggattcaaacgtgcacagctttatcttgatcagaatcgtgatttgattcaacgcgtcaacgaaaaccacatgtctcgaatcccagataacgtctctagaaacgttggcttgatcaacgaaatcaacggtaatatctctcaagttatggagatttactctgatttactctcaatttcgccaaaaa

SEQ ID NO: 50359 - DNA, 694 bp, Arabidopsis thaliana
aggtcgactgtcgactctagctagggtttgaccttccatatttgacttcttcttcctcaaggatcttcaggggttgtaacagaggatgatgtggtgcaaaatctgcttgaactactccatagacgttgacttcgaaaacagaatcttatttcggccaaatcacatgtgcccattagtcgtttagatacctaatcattattatttatttattttagctaattatatgacatttagcatagcaatgccacacctagatttttttatttttttttcacacctagaattttgtttgattgataacactgaacattcatatttgtaagactgtaacataattaacaatgggttattggaaattagaatatgatttttgtctctgatttttattatgctaatacgtttcatttaattcgttaccgttgctaagcaacgtattagcattttacatacaaaaactcaagaggagtcgggtaagattttaccaacaaagtcacgtgctctgcacatagcttccaacggtctagctttcggcattgtgagtcctggaccttcagtcatatcgacctcttcttctccaatcctctcccattcaaaacattgaatcaaagacccgagactcaaggtcactagccgctgagccaaaccggatccaggacatgcccttcttcctagcccgaacggcattagcttctta

SEQ ID NO: 50360 - DNA, 834 bp, Arabidopsis thaliana columbia
ttatgttagctatctatgtttccttagacagatacagttttggtccttctgatgttacagcggcgtaacgatttgatgcggaagaaacttcttccactatgcaccaatcctatagtagaaatggtggggtctgataatgagctgacctcctctgcaaatgtgtaaacatgggtacagtttttccatcagtgtaccaattagcttttagtcttcttctcaaccttttctgaatttataacaaacattgtgattggctttattatgtaggagctaaatgtgacatgaccaagggtcgggttgataatcccgtttgcttcgacctattgtttatatgatcttagtagaggtactccacacacactcttatctttgttatctgcttcctgtattggcagcgattgtatttcttgttcatagacatgtggttaattctttaggcattaggcgaaagaaggaaagaaaaaacaagactacacccctgaatttatgtactcatttctcttaaagcaaaacattcatagcagcaaatacaacatactatacggatacatctagtgcttgattttcttagtgaaattatagtatatatatccaaataatatcgcttgatcaaagtttcctagctggaagttgaattgaaattatccggtaattcataattagtattgtttgtttatatttatcaagtgtttttttatcagtgacctctcattttaggaaaaatgacagtaatccattttacttgtttcgaagaattcagtgtctagagccttctgaatgtaggaatcgcccacccaaaccacccttcgagtttgtgtagataattagttgcag

SEQ ID NO: 50361 - DNA, 617 bp, Arabidopsis thaliana columbia
cccaataaaagctgcaaaacacccaaaaaaaagaaaaaagcccgcctattcccggagaaaagagaaaatctgaaaattgaaattgacaactttttctcggccttcggtgttgttcccaaatccagagacacaccatgagcactcccatggagattgccgagcaaaaacctatggtggaagacccgattcctcttccaaacgcttccatggaggtctcttaccaaaagcccattgaagcagcgactattccagtgcaaatagccgtcgctgagccagtcgctagacccaatcgtcctccttggctccacgagaacaaattcctcgtatctggtacttcaatgctgcttccattcgattctcgatttcaatgatagagcttctctttatgatttccatttgtctgtggtctctagtggaggtctgcttaaagccttcaagcacggctcgtctagaggatgtccagagagctgtagaacggtttgtatcacattttctcatctattatagtggagctctgcttaaattaactctgtgtttgttttctttttgataatgggatagttttgtattttgctctaggatgctggaaaataggagcatgagctatgcagatgctc

SEQ ID NO: 50362 - DNA, 616 bp, Arabidopsis thaliana columbia
tagatttcttcgagggacaaaaacgtagacacgattcgtaaacagttttttttttaaaaggaaataaaatagacaacaggctttgggaccaaggcaaagtttcttgactcgtcgtaaactagaagaaaacaagttaaagagaggaggggcaaagtagtcaaaacaagtttgagtcatgcacaagaaatctcctgcatcgcagccaagtaggacccacgtgtggagaaaaattgagtagtggtaatgatctggtggtctcgggagtagtgtaagagcaatgattctgacccgtctatattgtaccacgtaaacagttctgaaaggtggtgattgtctgtggtaacgtccacttcattacaaagttttctagtagtgcacgtgggtttgacgcggtttgttagaccggtttgaccgtttgaaagacttttacgtcaagagtttttctcacttttcatttccctttgtgagtcccgtcacaaaacaaaaaagaaaatttaatataacgtattgaaaaatccaaaagtaaacgcaaaaatcgctgccgtttagtaagcaaacttgggctatcaataagccaatgagcctcttaatctacgcgaggatctttcttcttact

SEQ ID NO: 50363 - DNA, 948 bp, Arabidopsis thaliana
ccttctcctcatctcattgaacattcataacctcctcgaggtgtatcaacactgtaagccggattaaagcattgtatgtatgaacatctggggaaatcccttcagttttcataacatcaatcaagttaagtgcatcagtgaacttcttgttccgagtaagacctctcactctcgagttataactcctaatgttaggagaaagattcttggatttcatcaaatcccaaatcctatcaccttcaacaaacaactccctcctataaaactcttctaacatagtgttgaaagagatcaagtcaggctcgaacccgttcttctccagttcctcaaagatagataatatatcatccatagagctttacggcaaagtgccttgatcatggtattataagtaaccaaatcaggagtaatacctagcttctctggtaactccttgaaggtcttcatagcctcgtcaagcttctttgaattaacataagccgatagaagcgcattgaacgacttcacagttctttcacagtttagctcaggcatttcatcgaacagtttgtgcgcatgttccgccattcctgagtatccataaagaagcattatacggataacgaaatcctccgactttatgtcatcgaacttcttctggtattgaagaacttcgtcgatcgttgagaacttctttgcttccctgagacggcggataaacgcactgtagagtccatggacttgccggaaactctcagactcgcaggatctcttgaacttctctactttctgcgtcaatttcgaatttttagaatccttggcgtcattcgacgattgacctccgtctcctacagaggcggtggatgcttcaatttactagggaatttggtggatttggtttggcttctgggttttgcggacttagcagtggcgattgaagattctttgaagattccatggaggcgactg

SEQ ID NO: 50364 - DNA, 449 bp, Arabidopsis thaliana columbia
cattctcagtattatcgttaaatcttagtattcccttgtattctcagtattatcgttaaatcctagtattcccttgtattctcagtattatcgttaaatcctaatattccattgtattcccagtattatcgttaaatcctagtattccattgtattcccagtattatcgttaaatcctaacatatcaaattccttgaatgctttcaacgattcaactcttttatccaaatctgaaatcattgttataatttcattcagctggtctaccatcttcttatccaagctatcaatcatctccaccacagaaaccaagctcaggagttcttgtccacctactgtggggatatattccgcacccgcaatctatcgacttgaggtgatcttcaaggtttgaatatcctgctggtagagctcgtcaaacatgattaggcgtgcctctttatgacgct

SEQ ID NO: 50365 - DNA, 561 bp, Arabidopsis thaliana
tctcttgtattctttgtattttcgataagtccttgaatatcaatttccaattcatatccaaattgaaatccaaaaaacggcataccaaattcaaatctccacaaggcaaattgaaatcctaaatctaaacattccaaattcaaatcctaaaaccaaaaaacggcataccaaattcaaatcttcacaaagcttgaaatcctaaatccaaacattccaaattcaaatcctaaaaccaaacaaagacaaccaagttcaattcttggttctccgagtgatccttctcgtgacgtttgcttccacgggttttgaaggacctccatccttctctttcgggtccttctctttctctttctctttcgggtccttctctttctcttgttccttctctttcgagacaccatcctcctcttgatcaccatctttctcttgaacaacatcctcctcttgatcaccatctttctcttgaacaacatcctcctcttgatccttctctctcgaatcaccagcctcctcttggttcatctcatcttgattctgcgattgaacgaagttatatcagta

SEQ ID NO: 50366 - DNA, 658 bp, Arabidopsis thaliana columbia
tatgtgtctgattctaggtaacgtcggtagtaatatgaatgaatgtttgttgcagaagatcaacgagatgggccaagagaatgatggggatccgaaagagaaggatggtgatctagagaaagatggtgatcaagagaaggacccgaaagagaaggacccaaaagagaaggatccgaaagagaaggacccaaagagaaggacccgaatggtccttcaaaacccgtggaagcaaacttcacaagaaggaccactcagagaaccaagagttgaatttggttgtacttgttaggatttgaatttggaatgtttggttttaggatttgaatgtggtttgttttgtttggatttgactccggatttgttatgttaggatttgaatttgataagttttttttgaatatcaatttggatatgaattggaatttgatatgttaggatttaacgataatactgagaatacaagagaatactaggatttaacgataatactgagaatccaagagaatactaagatttaacgataatactgagaatacaagggaaaactaagacttaacgataatattgagaatcaagagaatctaagatttacgataatcagagaatcaagggaaactatgatttacgataaactgggaatccaaggaatcttaatgcg

SEQ ID NO: 50367 - DNA, 529 bp, Arabidopsis thaliana columbia
tcggtattatcttcaaatcatagtattcccttgtattctctgtattatcgttaaatcatagttttcccttgtattctctgtattatcgttaaatcatagatttcccttgtattctcagtattatctttacatcctaacatatcaaattccaattcatatccaaattgaaatccaaaaaaaagcataccaaattcaaatccaaacaaagcaaattgaaatcctaaaaccaagcataccaaattcaaatcataaaaccaaacattccaaattcaaatcctaacaagtacaaccaagttcaaatcctaacaagttcaaccaaattcaatttttggttctccgagttatccttcttgtgaagtttgcttccacgggttttgaaggacctccatccttctcttttgggtccttctctttctctttcgggtccttctctttcgggacaccatctttctcttgatccttctctttcgggacaccatcctcctcttgatcaccatctttctcttgaacaccatccttctctattgga

SEQ ID NO: 50368 - DNA, 775 bp, Arabidopsis thaliana
cttcaacaaaattttcgtgaaatgtaggaacctttactttgtaagctcaagatgttattgaaattgaacctttacaagatgataaaaaaatttacgtatctaatttcagtggatgcctcacgcaaaccagatcgtccagcttatttccatccatcttatactgtgacacgcctttcatttggatatagtgatccctagcttcctttcttaagctcctaaacggcatcacttcccatttcttgtaatttgacttcttcctggtctcactcatgtccggagatcccgagacaggtccttttgtagggtctgcatcgccccacaccttgcaattaccgaattgtcctgacccatccctcttcgaactagttggctgttggctcctttgtaggcgtaaggcagctgtgtgagctctgcttatcatttcacgacttggcacacttgaccagtcctcctttctctcggatctcatgggagaatggatccgtattacctgccaagcttgatttattcagagagaccacaaaaagtttaacgattagagcaaagtagaattatggttttaacaagttatctgtacaccaagacactctagaagttggtagtatgcccttccttgaagtgggttgtgcctttccttggcgtggaaaagtaacgcgtcctacattgataataaagatacaaaggaaaaatatggatcagaatcgtaagtatccaacctccaaagagctttggaaatatgagagatagcaatatggataaaagttatttaagatac

SEQ ID NO: 50369 - DNA, 989 bp, Arabidopsis thaliana columbia
atcgagctcctctgcttatcacggatccgaggttcgatgtcatgtgtgctagaatcgtgaagtattactcggtgaagaagttcttggaagagaagaaagcgaaagggtttgtcgattggagtaaagatcatgaaggctcgttgtttcactattcgtcgggtatgcaggctgtgatgcttgcagtggggatttgtgagaaagttagtgtcttcgggtttgggaagttgaattcaaccaagcaccattaccatactaatcagaaagcagagctgaagcttcatgactatgaagcagagtatagattgtatcgagacctggaaaacagtcccagggccattccattcttaccaaaagaattcaagatccctttggtacaagtttaccattgaatatacatatataccatcaagagttttgtcatgtagttattgttgttcaagcgaagaagcttgttggcaagagtgtcgttttgtccaagtcccaaagattttgcttcagattgggcagtgaagatgcaacactttcccaatggtaagagtactctttacaatttttagatttgtgttgtcacacatattgaaatatatatatggtatatttggacgatattctcacatcaatataaaccaaaatcattcagattgacgtgtcgatcgaaaaagttaatcccacacgcaagtttaatacgtttgagtagtacgtttattcatgcaaaacacaaaagcgtgaatccttgtaacaacaagaagatcgaaagctattatatgtaatgaaaagagagacaatataataggaagagtctttaattgaggattatcgtacaataatgaagtgaagcacaccaattttctcttctaatacaaatacatgagagaaacagaaaattcacgtgcttcacaaaattttaaagagagaaccatctttattaagaagaaaacctaattaagattgaaatcatacttctactaatcactaagataaataggggt

SEQ ID NO: 50370 - DNA, 616 bp, Arabidopsis thaliana
ccagtcttgtcataaaatataacctgcatattcaaaagcacttgaataagcactagaaacaaatcatatttatctttctctatgccgatgtattccatttccgcaagaaataatatggaaaaacaaaagccagaaataacgaacagtatcagcagcaacaagattcaaaccgactccccctgctcttgtagagatcatgaaaacaaaggcattgcttccatcaacttcagaatccaatcctctttctgttttcgcgctgaaattctttatcgcagcaaaacgttcttcagcccgtactgatccatcaaggcgctcatacgaatacctacgaagctccataaaatcctgtatttgttataagctacatgtcagtgtagtcaatgatgcacagatgttatagaacaaaaaatagctctataagaaaacctgcaaaatgtcaagtgttgaggtcatttgggaaaagaggaggacacgatggccactatcatggagccttttgagcaattgatccaaaaccaaaagcttaccacttgcctgtcagaacgcaattattagtgaacaaaaccttttttattcaatgaaaacttatagcgaggtgttagtgacaattgggata

SEQ ID NO: 50371 - DNA, 850 bp, Arabidopsis thaliana
ctaaagaatcgctaaaacgctgaatgcggaaatcgtcttcgttatgtctcagggcactgacaccccggaacagctgaaagagcgtatcgaactgacccgcaacagcttcggcggtgccaaaaacaccaacatcaccggcgttatcgttaacaaactgaacgcaccggttgatgaacagggtcgtactcgcccggatctgtccgagattttcgacgactcttccaaagctaaagtaaacaatgttgatccggcgaagctgcaagaatccagcccgctgccggttctcggcgctgtgccgtggagctttgacctgatcgcgactcgtgcgatcgatatggctcgccacctgaatgcgaccatcatcaacgaaggcgacatcaatactcgccgcgttaaatccgtcactttctgcgcacgcagcattccgcacatgctggagcacttccgtgccggttctctgctggtgacttccgcagaccgtcctgacgtgctggtggccgcttgcctggcagccatgaacggcgtagaaatcggtgccctgctgctgactggcggttacgaaatggacgcgcgcatttctaaactgtgcgaacgctgtttcgctaccggcctgccggtatttatggtgaacaccaacacctggcagacctctctgagcctgcagagcttcaacctggaagttccggttgacgatcacgaacgtatcgagaaagttcaggaatacgttgctaactacatcaacgctgactggatcgaatctctgactgccacttctgagcgcagccgtcgtctgtctccgcctgcgttccgttatcagctgactgaacttgcgctttagagcacactggcg

SEQ ID NO: 50372 - DNA, 592 bp, Arabidopsis thaliana columbia
aaacagcagattttgatgaattaacgatcatcaccgttacgagtgataatcggaatgtttttgcgttttatcattcatcgccgtcaccttaattgggagattaaaaaatccgatcatgtctgtgtcggagatcattagcactaccgccgtcaaaatcccttaccgcctctacaaagttggtacgtgcggaatccaacatctcatcatcatcccacacgtgacgttattgttattctgctttttccgcttttttccaaattaagactactaaactgcgtgccgtttccaagcgcctcacacaacaaccacttcttttattgtacgtgtggaatcgaacatgtcatcatcacttacacgtgactaactcacgtgacgttgcggttatcctgctgtttccaatttaaaatgcgggccgttttttagctcctcacacaacaacatttcttctccaacatagctaaacgcttcctttattaattagcagctgttttttttctttctcttctagtccttccaaattctttatcaaggaagataagtaatcaccagatattcattactctatccaagtacagattttgctgcaagaatc

SEQ ID NO: 50373 - DNA, 992 bp, Arabidopsis thaliana columbia
  unsure (1)..(992): unsure at all n locations
tcgccactttctcgatagcttctcccaccggcatcttgatttgcgtatttgctactcctctggattacatgacttcatttaaataaatagtaagaaacacacacagtctttggagaaatacatgcaccagaagttgtttcctctctaaacgggacaatgcatcccgcatttcagcccttcctctgtttcttctttttcccctctgtttttgcctcttcactgtgtttacataacagaaacgtgctttgtcataaagctcaagtaacaatttcaagaggcaagtatccaaattgaaacgcatatggtgtccaataacggggtatttcttcttttaatatctcattattatcacattccacaaagctagttacaaggtcagtatatatgagtacatatgcgtatgtgaacaaaacaacaccaaaattatctcaaatatgaaatgctcaggatttggagaatgcacgaagcgtggcatccaacgcttcccgatcataatctccagtgaacacgcagtttcccagcgggcctttgagaagaatcagcctcagcagtccatctgccactttcttgtccacctgcatcaccacacacatttcaatgaatttttcttagctcaaaagttgctcaaaagttaccaacttttttccatttacatctggaattcactaaaaactcaccgccattatggacttgaacatgctgacggtcatgctctctggcggagttgtaggcaatttcgcccgtactaggatcttgttcactctcttaacaatcgattcatcgatccaaccaagacgatatgacatgtccactgccattacctgagtatatataacaatgtgaacaaatctcgaatttggagagaagaagatggttagcaatatcgcagatagagaaagataccgtgccagctgcaacagcttctccatggaccactctccataaccanagccagtttctatggcctgcaaaattaagtgatgggtgatgag

SEQ ID NO: 50374 - DNA, 727 bp, Arabidopsis thaliana
aaaatgaaggttgttgctgcgtttttgcttgccgtcttgagcgggaaagcttccccaaccactggcgatatcaaggatattcttggatcaggttcgtgactttgatttgagcattggaatgtatacatgattattctagtagtgagaatttgtttaacttgaaatgttattggaactaggaattgtatatgtttgctggaaatgaacagtgtgatgcaataagaggcattatggtgttggtattggactgtgttgttataggtgattgctgtaattgtggtggaggaagaattgatggagtgtggcaattgttatgtttgattttgcagttggtgctgagacagaggattctcagattgagcttttgttgaaggaagtgaaagggaaagatttggctgagttgattgctgctggaagggagaagttagcttcagtgccgtctggtggcggaggtggtgttgcggttgcttctgctacatctggaggtggaggaggtggtggtgcttctgctgctgagtccaagaaagaagagaagaaggaagaaaaggaagaatccgatgatgtaagtttactttccttctaacaaaagtcttgatcttaatagtagcttgaaattgtaactaaaaatgatggctcacttgtgtgtgtttttgtgtttaatttgcaggacatgggtttcagtctattcgagtaagctggtagtagcatgaaaagtcaggttttgttg

SEQ ID NO: 50375 - DNA, 859 bp, Arabidopsis thaliana columbia
gttagaatatattaaattaatcatcgaacacgtctatagactaaatggaaacaatccaaaaatatcaaacaatgcatggtcgatttttattctaaacttatcttttcaatattctctttataagaaaaaagcagaacaatagtaattgaattggagtgaaaaaaggaatgaattggcattacaattttgtaaatggaatactggcctttcacacacgaatatctttgctttgttggattatagaatcattgattttggctttgataactatattatatattgacgttgattgttgtatgttgattgttgagaacagattgttaattttagataataatttagatatctacgagaaaagataaggacacgtgtgaacatttaacacgtgcgcttgttgcttttagaaggccgggaaagagagaagtggcaatggcggctgtaatgggaatccgagagaaggtggcgcatgagaagcaacccgaaagtggtcccagttcgacacatgtacgctccatctgtcacgtgtcttttcttttttatttctttagcatcctctagaaaataggagtatctttttttatagtggctctcgtttcttcgattattggttactaacatcgatttatcatttatccggtttctgttttggtaattgactgaagtggtggactttgtcgatcctcaaactaaattcatttatatcgactactaactaatttggtttgctacatctgttgtatatcttttctgtgtcatttttttaagtgaaatttaagatttttacatacaaattaagaaaacatatcaattttttgtctagtatttttctttatgtaaaacatagctaagtaaaataaat

SEQ ID NO: 50376 - DNA, 1160 bp, Arabidopsis thaliana columbia
caagcggccagttatgtgcgagtggtgagaagatccaggagtgcgccaatcgggtgcagatcgggtggggaagaccatcagatgaaaggagacttgagacatgagtctgttcgatgatctgaagcggcgacgttttcagtgtttagttttaagaatatggcgggaattagagttggggtcgttaattagatgtttttaattttggttttttttttttggtttctttcatgtgtgggcactgatgatgaggagtttcgtggtggttgtaattattagtgcttttaactttaactttattttcaatattgtttttcagctttttgtctctatgatatgatagtaagcaatgcagacaaaaaaagaagatagtatagtttaaattcatattaatacatagactaacggacatgaaacttgcagtaagacgacaggtgataatgtaatgtctttatgatcatacattcacatttacgcctgcttatggcaatccaatggcatgacagctttttgtataagtggatatatcaagtcacatgttacacgattacatggctggatccaaatgtagacatgggaagacctcatacgacgtcatgttggtatgttttggattatttcttgtttgaacttgttcgccaaaagtccaagataaagttgtgggcaaatttgttgatgacaactaaataaatctaaaattgttgagaggttatgtcttaaatggtatttaaaattattaaagattaagtaggttgcgagctctcttatctttactgaggtagaccgattgctgccgctgctaactcaaaacgcaaaacgctacctcaccactctcatgtccttgtgattatagaaatatgggaaaagtaccaataccgcgctggtggctgcgtttgcgtccccatgatgtttcgatatccgttgtcacctgttgtttcttttccctaccttgccttgtcgccgaacgatgcattttaaccgccttcgtgatctaagattaattttatgtgtttttctcaaattttagggttttaaaacatagttacacgcttaacctagtcatctgtgccgtctagacttaattatacgctcttagtgcctactctttcgtcatcatgtatgaaactaccaaggagatagatccacagtgaacaacaaaacca

SEQ ID NO: 50377 - DNA, 605 bp, Arabidopsis thaliana
taaccttatatgagcataattatgattaagcttccatttacatgattctagttatttactcatcttgtgtactatatatactgatgtaatgtcacattagatgattaatgagaaatcactttttataattctaaagtttttacacaaacttcttctcacgctttcttttccaacctcggctccttctcttcctcttattcttgctatcatattcttccttgttaataagctcaaaatcctctgtagatgcattttgttccatgcttttctcctgtgtcagagagttcagtgcttcttttgcaccatcagggttgttggagaggaagacagcttgggatggattggcttccacatgcatgtcttgtcccttgtcaaatgattccgatgaaaggacgttttgctcatggagctgctaaacaatgtcgttgtgtatgctcattgcctcgtccttccttttcccacttctgattctttcctccttttctttcttgcgttcctctttgtccctagtaataagataaagagcaatgtctagggagacctcggtggaagaacgactactaggataggctctaagatgccatttccaaggcgccaaacgagat

SEQ ID NO: 50378 - DNA, 774 bp, Arabidopsis thaliana
ccctaagtattgctcggcgagctttaaatactctgacacaggctggtcccattgtgctgctctctccgccacttcctcctccgtcgcttcaatttcgagcaaaaccaaaataaaaatcagattcgaaaaacgctagaggctaagtgatagtgtgaatttagggtttttttgtttaccattgcaaatccaagaggaggaaccatcggtgacggagatatcgaaacgagaattatgccaagtgcctttgacgaaaattggatcggcgccggagatttcgagacggagacaagtgtgtttcgttttctccgattcaaccattgtttcgataaaagtcgtcgacgaagattttgagtcaactccgatcataataatgtctataatttgttttggttttgcttacgtggatgctgagtcagcttcggtattgttttttttaaaatatatttagtgattttacttaaaagaagttgttaaaaaaaaaaaactcccattacatatagacaatttaagtaattattaatttttttttatttttttatcacaagtaattaaaaattaacaaattactgttttcattcagtaaattaattagtaattattactttgaagctcatcaaaagattgaagaatatctaaattagtttggcaaatctttgtattttgtatcctaaccgaagcttatctttaataaataaaaaatccgttaaatgttgttacttacatttctttttaatttttttaatcatacttttttctaataatatacatataata

SEQ ID NO: 50379 - DNA, 1361 bp, Arabidopsis thaliana
ggaaacacgaaccgaatatcggcgactttgatcgagatcgaaacaatggttgaatcggagaaaacgaaacacacatgtctccatcttgaaatctccggcgccgatccacttttcgtcaaaggaacatggtatcactctcgtttcgatatctccgtcaccgaaggctccttcacttggacttgcaatgcgacggaggaggaggtagcggacagagcagcaatgggaccagcctgtatctgagtatttagagctcgccgagcaatacttagggtttcagcagcctaattcggtctatggtttctccgatgctattgagggatctaaacggctctcttggacgtttgagaaggaagggactaaacttgagtggaggtggaaatgtaaaccatcagatgatagcaagaagatcactgttgggatcttggattttcttatggaggctaacataaggctaagtgtatgactcttatactgtacgttctgaattgtgaggatttgttgtgatgtttgagaatgatgatgaattagagcttaagttctttgatctatgctttgttagaaatggcaatttgatttgtgtttggaagatatgtgtcaatctctcaatactttagtgtttacacaggaagaagtggtgaacaagacgagatcttttgagaagatgagaagtgaagctgagagatgtctagcgcaaggtgaaaaactctgtgacgaaaaaacagagtttgagagtgcaacttatgcaaaggtatgaattattcgatcaccttggttactctgcttaatatccacatcgtggtttgttcttgcttaaactagagtcattggtttttatgatctgttagttacttcttttttttgtcaatgcagtttctttctgttttaaatgcaaagaaggcaaaactgagagcactaagggacaaagaagattcagtgagagtagttgaggaggaagagtcgacagacaaagctgaaagctttgagagtggaagaagtgatgatgagaagagcgaggaagaagcctcaaaaaaggcaacaagcagcaaagcccgtggcgggaagagagctgcacgaagctaagagattgccctgccgtgagattttcaggtcagagtttccattccaagttttgtcaaactcatagctaggaaaattgtttgtcaaaccttctttggtttaaaaaaataatttacaatttgtattacttctgaaagtaaatgcaataacttagagatggcatgattgattgttagaaagcttcaagccccaaattgtgataactaagaaacatagaccatcacacgaaccatattttattaccaaatggtgagaaaatattacaaacataaaattacaaagca

SEQ ID NO: 50380 - DNA, 828 bp, Arabidopsis thaliana
tttccccgtgttgagtcaaataaagacaaatgcaactttcctcaaactagcagggccacaacttgttcaggtatgaaaactagagtaaacgtaactgattttgatcttgttcctgtgatattttttgaaccaaacggaaagtaactttttttagacttatgtatagatgttcatcggagatggagcaaaacttgtccgtgatgctttcctgcttgcaaaagagaaatccccttgtattatattcatagatgagattgacgcaatagggacaaagcgttttgataggtactctatctagagtcatgtcataactattttattttctttctgatgactaatgctgacttttaattggcttacagcgaagttagtggagaccgtgagtacaaaggacaatgttggagctgctcaaccagcttgatggattcagcagcgatgatcgcattaaggttgttacccctcatattacccctgcaaatgtctatttatttagtgaaaggcatgaaaaactcataattttacaaacttaggttattgcagcgacaaatcgtgctgatatactagatcctgcccttatgcgttctggtcgtttggatcgtaaaatcgagtttccgcaccccactgaagaagctagaggcaggatcttacaggttctgtatcctttactgcatcttttcttttttctttctttatttctatgtcgttttaaagctaaaattagagagcttcatgcacttagacaagtcttgctgtgattttctatgtattccgcggataacttatcttgggtactgttttgtttttgcataatgttggcgatggggttac

SEQ ID NO: 50381 - DNA, 807 bp, Arabidopsis thaliana columbia
tcggaaacatatagataactcaataagtaacctttataatcaggatcccagcgttgcatctttagctagtagagtcatcaataactccaaaaatttctgtctagatcggataacgtgtcaagctccaaacgttgttctgactcagccttctcggaactgctctctagggtttctggattttgacagttgtttagaattgtttggccggaaagcaacgaccataactccttgaatataacttggatcatagtttcgttaattgctttggatttctaggttggtaatgaacgcgtcagtacctttacttttccggcacaacttcagttatggtttccacgagcctccaaatttgcctcctccacattgcatttaattccttcttactctttcttattcttctcttatacacccatgatctacttcggctttgctccaccacaacgctcaaggctctccacagctacgacatgaccaaaagggctcaccaatgctatccactacctcagtgtcgtcctgtcttctcttctctcctcacgtcttactctcaggcctcccatttctctctcttttacgctttgttctcaacctcaattcctacgacgtgttactccccctgctccagtttgatttatcttttcatcacagatcccaatttgcttacgcactcaacaaccactcatcaactcaacacaaagcggcaacgtcacgacggtaactgcaaccatacaacaacgacggctcaattgtctctctcctcttcttcaaattggttgtttagtttaggtttagatatcccgagttctctta

SEQ ID NO: 50382 - DNA, 592 bp, Arabidopsis thaliana
tcgactctgaccccttctttgtcttaggtacggaatcgatgtgtttgatcgtgtctggactccgtataatttcggaaactggtcacagattagtaccaatcagtcagtgaatataaacaatgactatcaaccaccagagattgctatggtcacagcctctgttccaacagacccggacgcagctatgaacatttcgctagtcggggtggaacgtactgtgcagttctacgtttttatgcattttgcagagattcaagagctcaaatccaatgatacaagagagttcaacatcatgtacaataacaagcatatctatggaccttttagaccacttaatttcaccacgtcttccgtatttacacctaccgaagttgtcgccgatgcaaatgggcagtacatattttcgcttcaaagaacaggaaattcgactttacctcctctgctcaacgctatggagatttattcggttaacttgttgccgcaacaggaaactgatagaaaagaaggttggtaaaacttatttctttattgttgattaagaccaaacttttacttcctaatgaaaatatgttttcagttgatgcaatgatga

SEQ ID NO: 50383 - DNA, 1029 bp, Arabidopsis thaliana columbia
ctcttggtactactctgactctaactgtcaacagttggaagcacatcaaggcgaagtatcagaataccaagtcaaccctacaagaaacagtgcaagtgaagttcagactaattacaagattttgaaggaaatagtttgcatcataaagatgtcagaacagttgtttaccacacacgaccccagttgtcttgaaattcgacatcgctaatgtcatgaaacgatgaaggcatcactttgaagcccttctctgcgtcatagagaggatcatattctagggatgtgtttgctagctgcaatcatagtttagatgataccgttaagacgagaatgaagatgaccatggaaatgggaagaaaaacatgattagcaactaggaaacagaagggatgatgaacaaacctgcaagttggatgtattgaaagcgcccaatcgccccataacataccatgcctgtataacctgttaacaaaactcgtggtcaaaagaaagaattggaagaatcattgaatcatcgcagtaagactcgacgttttgcaatagcaagaagaatatcaatttcttacacttccaatgagatcaacatctcgatctgaaggcgttccatagagctcaaaccatatgaaggaatctacaggattgaaactgcagtcatcaaaataagagtacttggttagtaatttatggaatgggatattattctagtagtcttatattatgttgcggaatgcagaaaccaaagtgaattaatggacaagatggaaaaaaagtttctcactctctgaagttaactttgaaagaaagcacagaaccagtcttctgtttctggaaatcttttcccttcttcctaactctttcttcaacctgaataattagtaaacatacacatgtccaaacttcacaatcgatagaaacaacacatataaatgccccagcgcatgccaaatagtcactaccaaagaaactataacagagacgagaattctttttagtgaattcgcccaacgattccttcttctcatgagccaggat

SEQ ID NO: 50384 - DNA, 703 bp, Arabidopsis thaliana columbia
taactgcgactcctctagtccagcccatcaatctctaagaatttagatttttcattttcttaattcatcaattttaattttcttagttcatcacatctaaaaatacagaacattattttaattttcttagttcatcacatctaaaaatacagaacattttcaattggtcagttacttgtatatatactgttaagtgctctctaaattaaactgaaacttacaaaattatcaaaagagtcaaaacactttaaagtaacaacaacttgtacaagattagaaaacaaaagatttgaaaaacatcgtcccaaacgaaacccggttctcttccggtttaggttcgagtgagcaaagccgaaatatgagccgccgagagcgtctgggctctcggaggcggtctgttaccggaaagtcgcggcggtctatcgttcccagcgagaaaaacgtcgtggacacttaaatttcgctccgatgcgccgccgcatcctgataatctacgacagtgagggctctctcgtcgctgcttcagctttgcgttgaatggattctcaggcttcgcgagatcttccacagttagcgcttctgccaacgttgtgaacgattgtgatttacctttgtaatgtttcgacaatcctctcctgttatcaaaatttccaaacataaattcgtggtaggaagattaaaaagtttctttacaacgaaaaag

SEQ ID NO: 50385 - DNA, 507 bp, Arabidopsis thaliana columbia
aggatcccccagtattatctttttaataatttatatatatatatatatattattgttattttcttttaatatataaacttcattcatccattagcttaacaattttccaatattttgtaaaactacctatatacatattattaggagttttcggaccatatttaagtattagtgtattactaccttattatgtgtttaaatatatatttttattaaatatagacatatagcaaaaagaattagtagtagagagattgattggaatcaatttttgattagttatatagtgtaaactaagctttaagaatatttaaaaaatagatttggtttccttataaatatgaattaaggtcattattaacgtatcataagatttagagcaatgtataaacacaagaagagaaacaataaaagttcagaaattcctttttcgattcaaaaatacgttaaaaattgacaaaatattttggcgggtggattgtatattggacccaaaatttgcttttt

SEQ ID NO: 50386 - DNA, 597 bp, Arabidopsis thaliana
taatacagttgaagcttagccggccaagccctgaagatcttggatatgttgattctatatcggttgaggaaattggtggtgtgacagtaagtactccgaagtcaattccaatatttttggttaattatttttgtctttcattaatcatagacaattctcggtcttcttttaggtcacgattgcaagaaacgaggaaggtggtaactccatctccactgtggtcttgcgtggaagcacagatagcattttggacgaccttgagagagctgttgatgatggagttaacacatacaaggtaatatctagcttcatttgtaccatctatatcgtataattcattaatttgtgactgttattacttcaattttattttcaggccatgtgcagagacagccgtattgttcccggggctgcagcgactgaaatagagttggctcaaaggttgaaggaatacgccaatgcagaaatagggtaactttcttttacttcattttttcaaaaattaaacatgtgaggctagcttttaaagcaaaactgtctatggtttggggactgaacttaggattcgcttttgaaatttcaggttggacaaatatg

SEQ ID NO: 50387 - DNA, 1025 bp, Arabidopsis thaliana
ctggagtatattatatgtacaaaaatcacgatcataaatatctccagaaaactctacaaaaattaaaataatttcaaatctaatattccaacttttaagattccagattctgttacaaaaggaatcgaatcaaagatcttcccggagaaaaggatgagcaagaagctgcggcgccgtccatcgcttactcgaatctttacggagacaacactcaacgaagctcctaaactcttcagaacatccctccggcgctcgcggcggttctccaaaacacaccgcgcacatcaacgtcgcccaatcaggtctctgtcccggcggaagataaggaaaatgaccaacgagaagctcaagcatcatcaatccgaaactccagatatctccggcgtagatatcagagcttccaccggaagattccgaatcaaacctctccggactcatataagcacaagtaccaacatacgaattacacgaatctaatgatcggactaagatcttactaactccgaaatcagcgattttaacttcgtttttcgaattgagaagaagattcgccggtttgatatcacgatgaacgatcttaagagcgtgtaaatagcttaatccttttaagatctgtttagcgaatccggcgagtttttgctccgttacaccgccgcgtagtgattctagggttccgccgtccatatactccattagaatcgatacttcaccgacgacaggtttctcgaagattccgtgacacttaacgacgtacggtgaatctgtacggcggagaatctccatctctcgcatcaactgtcttgtgaaaatcggatccatgtcgccgttaactgttttcaaagcgtagatctccgatgtggttttatgacggactttgtaaacaatcccgccgtttccgcatccgagaacgttgagtttctcgagatcacaagcggagattccgttacagccagcgacggtggtggtggtggctgaggaggaagaggtggagaagcggcggtcggagattggaggaagaggaagac

SEQ ID NO: 50388 - DNA, 734 bp, Arabidopsis thaliana columbia
ttggttaaactttagttcaaattagatattaaactgtagcttctggaatggcacaaagtcagaaaactctcatcatttgcttaatgtagttgaatttttttgtgctgaataatttttgcttgtttatgttttcactcatccctgaatttgatccatgattaaaatgaaataattaaccaagcgtttttcatgtgatgccatttttcatcaactttttcttattttctttgattcttcatcattcagtcaccgtaattttttccccttttgctgatgatacattatgtattttggtgaacataagtttttctttctttttttggtatcaaggtgaacataagttcaatctccatatattatacaacttgtttagtcacaaaatttgcttatctcagaacgtgtatcagttgttttccatatctatgaaactgtatttgccaccaccaccaatctttaagttccacatttttagtaggcgtccgaccaattgaatctaattgataaaccctaattttctcctcgcacgcagctgtatttgcatttccatgcatatgtctaattgtttgtaatcgccattgtttaaaagacacataaggtaacaacatttattaattaacatgcactataaaaccttatgaactggttatttttggcactagaacatgttacagaattcttgttcacggaaccttctcagcaacaacaagtgtttgatcaaaactaacttgaaagag

SEQ ID NO: 50389 - DNA, 528 bp, Arabidopsis thaliana columbia
gtaattgttgatacatataccatcttttacgtgacgactatacaatgagatagcagtgtaagaaagagacatacagagttggcagtacaaaaacatataagctgacgctacattgctacaaaaattttatagttgtattttacaattaatatatacaaaaatacttaattacatattgccatctgtaaccaccaaaaaatattattgtctagtataatcaagaccagtacaatctaatcagacatgagaaagaagaaaaaataatggacatgcacgcatatatgattgactaattggtaatgttccactctttatgtgaatctacgaagcatctaaacgcaaaaacaaacttgtacttttccatgagcctactaaggaaagctcgaggttttctatacaatgcagtttcggcaattatgtaattccttttatatgaaaatatttggattaatatatatgattcttatttgagtctctgatctctgattaattattaatgaatgataccgtcaattatgtggatagaat

SEQ ID NO: 50390 - DNA, 1215 bp, Arabidopsis thaliana columbia
acgcatcaacttcaggtcaagatgtattttcacttgaaaatccaggtcttccaatgttgaatcagggaacgccagtgctccctacttctggagcacatccatccactcctggatcatctggtgttgttctgagcaacaatttgccaaccacatctggcctacagagtgcttctgtcaggtagagcttttactgaatgatttgttttggtgaatgcacacgtctgtgaatctccgctcaatttacttgagggttattacttcttttgattgttgatatatttttttctttgtagggatggtagattcaatgttcctagagggtctttgccacttgatgaacaacaccgactacaacaatttaatcaaacgttatctggtagaaacctgcagcagccctccttatcaactcctgcagctgtctcaggatctgatcgtggacatcgcatggttcctggtggaaatgctatgggtgtacctggtctggacatgaacacactcacgtcaaggcctgtgttacaacggatgcgctcaacatcaatgccaaatactggtaatatgcatacctctggcatggtaggaattccaaacactggaaatattcattccggaggaggagcttctcaaggaaactccatgatcaggcctcgtgaagctgtgcagcatatgatgcgggtaagctacttggatttttttactgctacgctaattattacacttcgttttacgatttctcacatgtgggaacttaactatctatttcttacttcactacctggacttatttatctcgctctttgtttagtttgtagacgttcagcgcttctaatttttgtcaaccgctggtcgattgtcattttgaaactcgttgacaacattacgaactctacaatggtgataaaaactgatattcatgagtttcagatgcaggctgctcaagggaacagtccggggatcccagctttcagtaatttgagttctggatttaccaaccagacaactcctgttcaggcgtacccaggccatctttcccagcagcatcagatgtcaccgcagtcacatgtgcttggcaactcgcatcatcctcatctccagagcccaagtcaagccactggggcacagcaggaagcatttgctatccgtcaaagacaaattcaccagaggtatttgcagcaacagcaacagcagtttccagcatctggttctatgatgcacatg

SEQ ID NO: 50391 - DNA, 598 bp, Arabidopsis thaliana
tatcatgcagcaacaaagaagtattttgttgcctgcctcacatccctgttgactccgatgcctttaagatacaaaactccaaggttataatgcccactggggtcttcattgtcaacagccttctcaaaatattctcttgcctgcatttgaaggcatacatccatagaatgttagactagcctataaagagtaagcctgggaatgatgaggctacgaatgaacagcctaccttagtatagtttttcttatctactccatagcctttgacatacaagtagccaattccattaaatgctgaatagagaccttcttttgcagcaagtgtaagccattcaagtgccttggtataatttctttcaacaccagctcctctagcatatatctcccccagaagttccattgacctcggctctcctttatctactgctttcaaaaaccaatgcaatgccttggtgtgatcacgccttaatcctcgcaggccaaagtagtagaacagtccaattttgtacattgcattagcattccctttctgtgcctgatatccaatatctggaaatcttcatcctcctcgcctcgagatttcgttagagcacctttg

SEQ ID NO: 50392 - DNA, 936 bp, Arabidopsis thaliana
  unsure (1)..(936): unsure at all n locations
cccctcttttacatattttggcaattttatgagtttagctaatcctgttggtaatctcagttgtcgaatgttgtgaaatgagttgagttttgtttatttgtatgattgtaacttataagaaagagaaggattccaaaatgggtagaagattcaaactcaaccggcaagtaaaaatcgacaaaaattcttaatccggttactggtttggttgatttttcattgccataagcaagccatacgtttgtggacgtgctaatagttgatgctagtctccgtacagctacatagcgttgtaaaccgttacaaatcaaattcagactctgtttccttcacatgaacaattcgattccctggtagaatctaatccccaagccaaaaaccctaataaacttcactacggcatcgtttcagccactttggttcaaatttcgtggtatttgtgtccgattattagaaagtgtcacgaccaggtcaaccggagacagaactagccacgagatttcaatcacggtgtatcgtccaacaattaaaacaaacccagattgattgattccactgagaaatccgtcagaagcggtttgaaagaatggccgaacacggtgagactcaagctgatgaagaagaagaagaacaagtatggagctggggtgctggtacggacggacagttagggacgacaaagctgcaagacgagcttcttccgcagcttctctctctgacatcacttccttccatatcaatgctcgcttgtggcggcgctcacgtcatcgctttgacttctggtaaacctcccaaaatctctctgatcaaaggaatgttgttggttttagtccaagtaaacattttaattatgctttttgcaggtggtaaagtcttcacatggggaagaggaagctctggtcagttaggacatggagacatcctcnacattacttt

SEQ ID NO: 50393 - DNA, 613 bp, Arabidopsis thaliana
gagttatatttcaaccacagttagaacatccgttaaaatataataatcatgaatttgaatgtttgaattaaaaaagcatttaaaaacataaaattaatttagatattattcaaacaactatagatattaaacagatatttttcgagttttttctctataaaaatatgatattttttttctttttgacagcatgatactttttctttcgttctattttttttataaataaattatatagtatattcagcatgatacttattatgatctccatcatggcgtacgtcgtggatcacgccaaaagcggtaaaacatgttatctcatgtcacatgaccccaaatgaaatcccattactctcatctaatatattttccatttatatacatataacagcacaaatccacgaggagacacacctcgtacgtattaagaaagtcacttcaaaaaatggcgccaccgcattttctactggtaacgtttccggcgcaaggtcacgtgaacccatctctccgttttgctcgtcggctcatcaaaagaaccggcgcacgtgtcactttcgtcacttgtgtctccgtcttccacaactccatgatcgcaaaccacaacaaagtcgaa

SEQ ID NO: 50394 - DNA, 494 bp, Arabidopsis thaliana columbia
tgatgctatttaaagtttgaaagatttggctagttttttgttattaatcaaggagcttttttcggtgttgtttttgtttttggcatcggggcagacatgtttacccgatatgttttaacaacattctctaattcctaaacatcttttggagttgcaagtattactgatgaatggatattactttttgtgtattattcaagtagtatctggcgaggtatttctgttcaatcagttgtttcacatcttcaccaatcgtttatgtcatttaggtatacagataacgtagtacagtttttacaacgtacagagatcccccgtataccttttttactgtacagatataaccgtacagttattacagcgtacagatttcaccgcacacttactaagcgtacagattgcgttttatccgtacttatagtggtgtacagatagcggcgtacacatctcagtgtacagattgttcagtacagatagcggtgtacagatagcga

SEQ ID NO: 50395 - DNA, 290 bp, Arabidopsis thaliana columbia
gcagactactcatacatgatgaataaagcaaacaacatgtatgaataagaaagcataaacaaaatcaataaggagaaaagagttagaaaagatctcttcactattattgaaatctctcatgaaactctgaaaatagggatccaatgtctgaatagcttggaaagtgctcaaaaacatcttaggcctaattaatgacatttaaactatataaatatattaatatacccacacatatacacacatatattaatagttttaaatagggaagtgttctagggaaatttttcatt

SEQ ID NO: 50396 - DNA, 471 bp, Arabidopsis thaliana columbia
cgaaaacaatgtccgaacatataatttttgccccgtaatatagcacagatcacgaaatggcccgaaaaagtacatgtaggtcaaaatttggagtagaaaaaaaaaacaatagaagaattccattttccttcctcattaattggagagctctctttgggctttccgaaaaggtatcacatgccaagtttggcctcacggtctaaaagttatagaatcatatatttttaacaaaacaaaaaagagaaaaaccgagaaaaaaaagagggatgcaacacgaggaatttcctggaggtcacccatcctagtacaactctcgcccaagcacgcttaactgcagagttctgatgggatccggtgcattaatgctggtatgatcgcatccgttactacatgcaatgcaatcgtatctactcttttttgaagactttatgatccatttgcggtgggtccaccagctatgtaggaatccct

SEQ ID NO: 50397 - DNA, 531 bp, Arabidopsis thaliana columbia
ataagctattcatccatattttcatagattcatttagtttccaatacagtgaagagatcctttcatactataatcttatttgctgtgtttatactttcttactcaattatattgcttgtttcaaactatatgtctgagtagtttgcctgttaggaatagggtttctcattaggaattcatatggtttagtagatcgccccctttgctaggttatctgtagaattcttcatctttaattgttcttaatgctagatctagagtaattaactagaacttgaatccagacaatagatatacccgccataggtatctgtagttggatctattattggatgagcctggtttataggtgtgtaataagaatcggccaatctactaaggtgaacaattgaactcgtttagaatgcatgtttaagttaaagatctctcggcttctctgattattcttaagctatagacatagggagtttcgcgaaacgccacagttatccataattagagtttgagttaagaatggtcgataatacctag

SEQ ID NO: 50398 - DNA, 525 bp, Arabidopsis thaliana columbia
cccttttaaaatcctttgtaaatcttttaaaacccttttaaaatctcttgtaaaacttttaaaaaccttttaaattcccttgtaaattttcctttttaaattcctagtacatattttaaaaccattttaaaatcccctgtaaatcttttaaaatcccttgtaaatctatttccctcccaaaaaaatttttgtgggatcattttttttgaaaaaataattttggcgggaaattttttttccgaaaacttttggcggaaaatgtttttgacgggaaaattttggcggaaaatttgttttggaatattttaggcgaaaaaatattaagattccattttgttaacctaaaataatttccaaataagggtaaaatggtcattaaaaatttaaagagggtagaaatgaaaatggataaaataaaaggatagagttgaaaaagggcatcatgaaaaaaaaaagagatctttcttcaattaaacatataattacaaaataattttaaaaggaaatcttgcaaaatctgccata

SEQ ID NO: 50399 - DNA, 538 bp, Arabidopsis thaliana columbia
gaggatagactaaattaaatatatatacatgaagaaatccgatgaaatgtataactgtaattttccagtcatcttcaacttgagtatccttttctgcatttgagtgtcactaataaacatgttcttgatcgaaaaagcatcgatcatttagaaaagaattaagtcattcgatgcctaaacgggagataagacattatttttggaataatattagcacactactaactatgtattaggtataatatggaaaggtgaatattttacgtacatgaatacatatagttatgaaagacttgcaatttagtattggaaaataagttttagctgaatcagactacgatttgttgaatatcatatttgcataatttatattgagataaatagccatacaaataacttaattttgatgtcaaaaaattagattaatgttgtaccatgtacgctccaataaatatttttgtgtacgtacatagtataagacttatgtgatttaggcatttttaggatataaatgtttggagagggcatacacgtgtac

SEQ ID NO: 50400 - DNA, 547 bp, Arabidopsis thaliana columbia
ccctttttttaattaattaaaataattgtggcttccatccaaatcctaatcactataattaaaataatctaatcttttatatatattatttttattagaaaaccctaatcaatatattgtaaccctattctctcaattatggcatccgagaaaaatcaaaatcaagaatcaaacataagtatcatctatccttttattcattcattagctagtgtaattttttgactatttcatggccttgttgtttttattttattttgtattcttttgatttttttgattgaatacatttttctatttgttttctcgattagaaaatcatctggctggacgagatgatatattgtatttttgtttagtcagaaaatcaatttttcgaatattatcaatttatcacaatatattgtatttttatttctagtaatatattatatttatcgcggttatcttcatttaattactatcgcacccgctgccattaccagtcataaacttccgcagacgcacccattatcaaacgctcaaccagtcgttcaaaacgcttgat

SEQ ID NO: 50401 - DNA, 363 bp, Arabidopsis thaliana
tatttaaataaagtttgggtaagtagtactcaaacccgagatagttttggttacttatgggcaatacccgaattatccggacccgaagtgaacccggatagaacccgacccgaaattgttgatataaccatacgggtccaaaatttcaaaacccgaaaaatccgaacccgaaaggacccgacccgacccgacccgaatacccacatgcccagggctaatttttcttttgacgattgaacacattccaatgcgcaaaggttatggcggcttttgagattgggtataaccaacctaaggaatggtccattgtgtgaaccccaaaaaaatggggaggaccttaaccggaaatggtttccctaacaa

SEQ ID NO: 50402 - DNA, 649 bp, Arabidopsis thaliana columbia
taaaatcagctgtaacgtaggctgagttatactcataattccaccattttctcatgactcaaatatttttgtcataagtcagccgcaacatacggtaactcagtcgtaactgccgttgtatcgtgttacggctgagttcattaatccacgtcagaactgtaactcagccgtaactgtcgatgtatcgctttacagctgagcttattaatccacgtcagcaatttctgacgtggcagtggcattccttgtaattacgttttttcatgtaacgtttagtaggggcatgctgggtatacaaaaaaagacaaaaatatgacagtaataaaaaaaaagttttgtatggttctggtcaatacacctaatttgtatgacatctgagtaaatctcccttttcttatttgtttcgtttgtttctatagtttcagtcaaagtgatttaatatttaactttattacactcatgaatacaacattttttatgcactccatgtagtcttacttggtaaacatgttctgtttttctcgttgcgtgggtgtcttgattttacttcttgcatactatctagtactcacatacattacatatttttgcatttgattaatgggtggataggaagcgcgaatatagataattaagagatggatgatag

SEQ ID NO: 50403 - DNA, 521 bp, Arabidopsis thaliana
gtataccaagtaaacggaaaaaagttgcaactacaacaaggctcgtcctcgtaagcatgacgagtgtgagaatcccgatgtaattcttaggcctggggcataatacccgaactcgaagaaccgaaccgaactcgacccaaaatacttgaatccgttttatttcggttccggctaattatccgatcgggttttgttttcaaataactgtgggtatcgggtattacccgaaccgaatctgatactcgtgggtactttttattacccgaacatatatatacatatgaggacatatatgcactaataacttgaatctgtgacttgtttaatgatttgagttctggaacaagttcaaaacaaggtttacttcttgttttatattattgtcttaagaaaaaaaacttgttataattgtggatttttcgggttttatgggtacttttatgtatgtttgggtatatttggacaaagtttgggtaagtagtctcaaacccgagatagttttggttatttataggtaatac

SEQ ID NO: 50404 - DNA, 1063 bp, Arabidopsis thaliana
cactaccataattctacgtacatagcagacaaattcacgaatatttaactttaataatggaagatttttggatatatatatacctgtataattgtttagttaaagttataagaaaaaaacacacatatataaaaataaaaataaaggttagttatgaacattgcaaattttgtattaaatggtgatttatttttataaggagttggtcgaattttcctacacttaaacacattaaatcttttgagattatatatgaaatgaaacagtagagaaacctgttgaggactcatgtggtaaagtagttttcgtcggtattcaggtttgataatagcactggtgggaggattctccggtcctagaccaaaaccaagctcgtagacatcaccatgttctgatagatcaggcactccctgtgacaaagaaacataacgtcacacaccagttaacttgactttaaagaaatgtgtatcattacatctttcatatcttcatctgtctgaagcccgtttttgagcatcgaagctccaataaaaacagcgagacagatcttcttagggaatctctgtatcgcactcgttaggctaagccctcctgcactgtgacccacaagtatcacctgatgaaaaaaacagaacagagaaaaacagagtgagtttgcttcagattcaagaatcaattcatttgagttctgaattaggtttcacctgttcttgttcggggaaagaggagaggaagtcgatgagtggttggttgtattggtcgaaggtagtgagtgaatccacggatgaagaatcgatgccggaggatttgaggtcgatgcaagtgacggtgaagccagagacttccatgagacatttgatcttgtaccagcaccatgatcctaagctcatgccatgtattagcacaaagtgtggtggttttctacttggtttgagttctagggtttcttcttgattctcctccgccatcgattacgccggagatttgcctgagattttattggggttttccacggaatgctctgtgtgccttgtcacatttgtcaaacgcatatatagtgaaa

SEQ ID NO: 50405 - DNA, 1141 bp, Arabidopsis thaliana columbia
ccgtattattatgaaattaagattgggctcgtttatatatgggcgtcttcagaaacttatatggcccaatggtttgcatggcgttatatataaaacaaatcaacggtctttaataacgaaataacgagagccgttaatggtttatttgaatgaaaaatcatttttcttcatacagcatatgaactttacgatcctgcaagactttttatgatcaggtataaaagaattcaacactcattttgcatacattacgtaccaattaatgttaaatgatacttaaactagcatactaagatacaccgacccatctttctccattgttttcaaataaaaattaattgttgcaatataagcaatgtggtgttatgaagattaatattgagctcatttatacgtgggcctggcaatatggcccaatatgtttggattcgttatgtaaaattgtaaattaagtccttgtcgatgaaaaaatagagtcgttaatggattattttagcgaaaatcgtttctattcctataaaattgaaaatacaaatgatttgatttaaattataagatctttcaagactttctagtatgtattgctgctatattaaggattaagatcatgcataaagaagaactcgaaaactatttgaaaagaaaagaatatgaattgtgacatatacccaccacgcgagtatacttgatcagacctcattttgcataacattatacgacttcagatgcaccgactaatcttcattttttcatataattaattgttgtcatgtgtaacacatgcaaaaatactctcattttttaagattccgcgtaattcaacttttaggaaaacaaatctcaacgcgaatctcaaacattcaagaataccatcacttttgtgttaaaaaatgtactaatcaccattttaattcttagatccaaaatgtattttacatctataaataacatacatcgtagtccatctccatcacaaacaatcacattcatcatttcatttaccaaaaaaaattataacctgaatataatagagatgggtagtagcctcacgcgcctactagtcttcctttccattttcgcagccatagctctgaaatcaaactctcaataccttcttccgatcaccaagcacgaacccacc

SEQ ID NO: 50406 - DNA, 895 bp, Arabidopsis thaliana columbia
ggatgcagaatataagccacgagcatttgggataatggtgatctctgccatggttcactcgaccattttcacggccattgtcaaaaatctctacgggtgggtgcagaggaaacacatcacttaccggcgacaaaccgttcaacactacgaaccaaacaaacctctcaagatcctcacttgtttctaccaccgtgaaaccgttcctcccatcctcaccgtcttggagctctctacttgtccctcgagcgcctcttcgcactccatcgtttccgttaatctcgaagagcttgagcaaaataacgtccctctcctcattcaacaccatccaggtcacaacgacgagtcatcaacgtcttccagccgcagagatcagatctccaaagccttcgagaaattccgaagcggccacgatttgcaagaaaacgtttccgttgaatgtttcacagcagttgcaccgagcaagacgatgcacgaggatgtatgtgccttggccttcgaaaaagaaaccgatctcatcattttcgggatggccgacgggactgcagcagaacgaaggctctgtcgcaacgtccggaatgcctcacctagctccgttgcggttctaatggaccaaggacggcttccagatttcaagaacatgggaacggcgatgaagaacggctcaatgagaatcaacatctgttcaatattcctcggtggagcagacgaccgtgagacactggcctttgcggttagaatgacaaaccaaccttacgtaaacctaaccgttcttaaacttgtcgacggtgaaaacgtctcacacctaaacgacgtcgtagagaaaagactcgatttcagaaccatcgaaaaattccgtcaagacaccatgaacaaacacaatgtcgctttacgagag

SEQ ID NO: 50407 - DNA, 670 bp, Arabidopsis thaliana columbia
tcccccgccaagctcgggtacatttgatgaatgtgatgattatggaggtgctctaaaaatcactcaggaaggtgatgtgatgcaagaagaaagtgactttgtaagtgttctttacattcttacatcacattcccatattttatctgattacattttgtttttcctcctgttattgcttatggactatggttataacaatatcaaatttcttgtaggatcactgttcttcaaattgtacaaagatgaaagaatcaatgatgagagagatagagaaccttgaactgaagcttcaattgtatggaggacatggtctgaataatttaacctacgacgagcttcttcattttgagcatcaactcgaatcttctctccatattgctcgagctcataaggtatataatatacacactctaggatataattatttaagcgacatatatattagatattcatatacagcatgtactttggtataaaatagttttttataagcacacacatatcccaaatttcacagttttagtggttcatgtctcttgtttattaattatgtagttttgagttcatgcagcaggagcagcagcaacaacaaacagacaagcttaaggagaatccatggtgtgtcaaggccgaagatgatgacacatgcacagcaagtgaagaggagacc

SEQ ID NO: 50408 - DNA, 572 bp, Arabidopsis thaliana
aaagagctttttttgtttattttggccactctggactatggacgggaactcaagttcaattatgtgtttgcaggtacgttgagaatggctctcttgcaaacattattaaaccaaataaatttggacctttcccagaatctttggtggctgtttacattgctcaggtctgtatacatctttcaagttgagttaagtttcgttatgcattgtgtactaactagtgaatacaggtcttggaaggtttggtatatctgcatgagcagggtgttatacaccgtgatattaagggtgcaaatattttgacgacaaaggaggtgtgttttctatattatctattctcagacatgtcttcagtgtgtttttgttttgagatctgctggataagattcttctaggctttttccttagaaagatacttgactacatcacacttcagggtcttgtgaagcttgctgactttggagttgccactaaacttaacgaggctgatgttaatactcactcggtggttggaactccttactggatggctcctgaggtacacctttgattatatattttccatctccata

SEQ ID NO: 50409 - DNA, 1243 bp, Arabidopsis thaliana
taattaatccccatccgtaacggtccaaatccacagtttctccctcgtggtccttaccatctcttcgacggcgacggtatgcttcacgccataaaaatccacaacggtaaagccactctctgtagcagatacgtcaagacttataaatacaacgtcgagaaacaaaccggagctccggttatgcctaacgtgttttccggattcaacggtgtaacggcgtcagtagctcgtggagctttaacggcagctagggttttaaccggacagtataatccggttaacggcattggtttagctaatacaagtctagctttcttcagtaaccgtctctttgctttaggtgaatctgatttaccctacgccgtccgattaaccgaatcaggagatattgaaacgatcggacggtacgatttcgacgggaaattagcgatgagtatgacagctcatcctaaaaccgatccaataaccggagaaactttcgctttccggtacggtccggttccaccgtttttaacatatttccggtttgattccgccgggaaaaaacaaagagacgttccgatattctcgatgacgtctccgtcgtttctccatgacttcgcgatcacgaaacgtcacgcgattttcgcagagattcagcttggcatgaggatgaacatgttggatttggttctcgaaggtggttctccggttggtactgataacggaaaaactccaaggcttggagtgattcctaagtacgccggagatgagtcggagatgaaatggttcgaagttcctggattcaatatcattcacgctattaatgcttgggatgaagatgatggaaacagcgtcgttttgattgcaccgaatattatgtcgattgaacatactttagagaggatggatctggttcatgctttggtggagaaggtgaagatcgatctcgtcaccgggattgtgagacgtcatccgatctcagcgaggaatctcgatttcgctgtgattaatccggcgtttctcgggagatgtagcaggtacgtttacgcggcgattggagatccgatgccgaagatctccggtgtggtgaagcttgatgtgtctaaaggagatcgggatgattgtacggtggcccgtagaatgtacggttcaggttgttacggcggagaaccgtttttcgtagctagggatcctggtaatccggagctggaggaggatgatggttatgtggtgacgtatgttcacgatgaagtgactggag

SEQ ID NO: 50410 - DNA, 996 bp, Arabidopsis thaliana
ctaaagagcacgaaccacattacgcccgatgcgaccgaagccatttatcgctacgcgtacaggtcatagatctcctgcaaggttttccctgagcaaatttgccagacagagtaatccagcaaatcgtccggggaaaccttacctgtcgcaaactgcgactgattggttaattgtcgaacatttaatcgactgaaacgcttcagctaggataagcgaaacgtggaataaaaggaatgtttgtccagccgaagaagacatttatctgactcacatcacacttttatccccttttgtgggaagctttattccaggctggcgtaataataaccctacaataactggaataaattgtcagcttgtgaagtgataccggccttcttcagtcatctctactatcagattggcctgacggctattcatcagcacacgctcgacattggggccatcggtgcgggcataaaatgcttcggctacttgccgcgttaatcgtcccgcaattttacgactaatcaagcgctcccgcagaatttgagcaggtgcatgaataaaaatagaaaaatcgcagaaagatgccaactccagccacttttcatcatccagtaacaaccagtttccttcgacgatgacgagtggtgcggtaacgtgcaacgcatcttcaacaggatcatgcttttgtcgatcgtactgcggccacgtacaatccccttccacgacctggcgcagattttccgtcagtttcgcaacgtcaaatgtctctggtgcgcctttgaaggggcgcaattgatgcgcatccagccagctattgtaatggtgaaaacatccatcgggagcgtctgaatagcgggcagttccgggtcttgttgcgcgagatattcccagaaggtggttagggttgatttaccgtccccggcggacggcaaagaaaaaccaccgtacgccgctgcggatttaccgtctgtaaggcgccaacatgtgcagcaacggtttatgtacatt

SEQ ID NO: 50411 - DNA, 611 bp, Arabidopsis thaliana columbia
atgatgttcaatcacaatctcaacattttgcttgtcaaagaagagaacaattgatccacgagcatggagttgatgaagaaggtgaagattactcagatagtgacagtggtaacatgccacaaaccgaggttcctgaaacgcaagaagaagaagaagtgtatcgtgttaccattgatgatgatgaaatattccaaaattctgctgctagaaggcaacaacgaggtaggccaaattttcagtcaaccgctagacgtggaagtagtgcacaaagatctggaggaacctcacgagtttctattggaagtggttcaggaggaagtcggagcgacaatcctttgaaacaacaatacaagacagcatcactagcttcggagaattccaacgacaaagttttcaacaacttcgtcctcgtgcttttgaccaagatgattacgatgaatttaaaaaggcggaacggatatttacctgcctagatcttccaagcacactagatttcattgggcatgcattaatgcacttaaggagctagtattttggcctaagtatttcattgatatagctgcaacgcctgacaaggataaggtactactgttagaagctatgactggtgt

SEQ ID NO: 50412 - DNA, 1172 bp, Arabidopsis thaliana
ttatatagtttcttattagtataacaaaaactcgcaagggtataatggtaatttgaatagcactatgtcatttcttttacatttttagaaaattcttcttcataattaagacaacgttcatctccaagatttctctccattgtcgaccttcacaaaataactatctctctctgtgttgcatgcgttagtactttcaatggccacagaacaagaattcacacgcgcatcacgcttctcacgtgactcaagcagcgttggatattactcagaagaagataacacggaggaggaagatgaagaagaagaagagatggaagaaatcgaagaagaggaggaagaagaggaagaagaagacccacgtatagggctcacgtgcggaggaagaagaaacgggtcaagtaataacaacaaatggatgatgttgggtcgaatacttgacccgagatccaaatgggttcgagaatggaacaaagtctttctccttgtatgcgcaacgggtctattcgtagacccactttttctctataccctatcagtgagcgacacgtgtatgtgtctcctcgtcgacggttggcttgctcttaccgtcactgccttacgctccatgagcgatcttttgcacctttggaacatttggattcagttcaagattgctcgccggtggccttatcccggcggagatagcgacggcgataccaacaaaggaggagggacacgtggctctacgagggttgctccaccttacgttaagaagaatgggttcttcttcgatctcttcgtcatattaccattacctcaggttagtaattaaccaatattttaatattcctattttaaagaaaactgatttaattgttttgaagtgtcttttatattagatgtaatcattcgtatgagcttctatcttaatttcttcctagactacagaacaatccatggagaaaatttcaaaatttataccaaaaaaagaaactcatcgtgcaaaactatgtgaagttttggattagttaaaatattgcttacttattatatagttataatatgccaaaattagatgtagatcaagtggttgtactgagatggtccattatattagtcgaggcagatttttcattttatatgcacacataacacatttaaatgttccaaagtttactatcatttagatagtg

SEQ ID NO: 50413 - DNA, 500 bp, Arabidopsis thaliana
atgattttctaatcgagaaaacaaattaaaacatgtattcaatcaaaaaactcaaaaaaataaaaaataaaaaaaatgacgatgccatgaaatactcagagaattacactagctaatgaatggatgaaatgatagatcatacttacgttgattcttgattttgattttgattttcgtcagtttgggtggatgtcgtaattgagagaatagagttttaatatattgattagggttttctgataagaataagatatatagggtttgggtggaagacataattcttttaattaattaaaaaaaaaaaaaatctaaccgctaccgcccacaaacgtttgtgggaaggagattttgaaatctggcgatttcgaacggtccaaagcggtatctagcagtttgtatgattggtgccaatcgctaacaaccgctaccacccgcaaatgcagcgtttgcggatggcagagggaaaccaatcaagcccttaattgttccttaaaacaaga

SEQ ID NO: 50414 - DNA, 589 bp, Arabidopsis thaliana columbia
ttggtgcaactaacaaaatctccaaaaaatctgagggtttgtttaatcctgcaaaaaggtagtctcttatctaactaaattttctattttatcatggatttagtttttgctttttttttttctggctgctataaaccctagcgttcgaattgattcacacagatcatataaacacatcatataaacacaaacattgtatgtaagttattgattttgtttatagtttgttcgaattttttgtttatcattggttttgagaagaaatatgcatgaaagtttgtcaatttagctgaaggaacgttattttgttgttgtgcagtcttagacattgaggcggtaggaacattcaacatgtgtcacgcagctctcaagtatcttaagaaagtagcgcctggaagagactcatcaagcggtggcggttcgattattaacataagcgctactttgcactacacagcttctaggtatcaaatacatgtatctgcagccaaggtaatttgattagtctgataaagtcattcagtgtctcgagttttggttcggaaatcaagaactaacttaaaggaacaatagaatgtagcaaaatgtg

SEQ ID NO: 50415 - DNA, 531 bp, Arabidopsis thaliana
tgcaaaccaagggcataaatgagtacttaaggttcgcagaagcagtgatagataagtcatgtttctgttcattaccaaatagcgcctgatcaagacttccattaggtagatactcatatacgagcatacgatgctctccttcaaagcagcacccataaagttttactaggttgcgatgtagaactgaagaaattgctacaatttctgcaacaaattgtcccttcccttgacgggatcccaccgacaatagcttcaccgcgaccactcttccatcattaaggtttccctattgaatgtgtttttcaaaacaaaacgtataaacagacactcttctttcctagtatatctaagaatatacagatatcagatatgtcgtccatttcggtatgggtaccttaccttataaacaggcccaaatcccccctctccaagcttgtttgagggatcaaaatcttgagttgcacttttaagttccgaataagtaaagatgtaaggctttacgtccataccaagtagctctgcaaaaaacga

SEQ ID NO: 50416 - DNA, 534 bp, Arabidopsis thaliana columbia
gtattaattataaaaataacatttttaaacaaagtcaatccaatgcagattatatgcaaatagtaaaaacattaaaaatattatggcgtcacttttatactatactatttcttatgtaattcaaacaaaatatacaatttaatttatacaaaatattaatgcttgtgctgtatagcacgggttatgatctagtactcttttattagtgaagatctcaaatataataacattagcatttatattatattgatcaacactagattagcatatatagatctcacaaaaaggataaaaagaaatcttattcacttagttttgaaatattctctattaattaggatgtttccgttggttttaaaaatttatttacataaaaactacattcggactctgattcgttacgacatccacttgtcgtttagatggagtgacaattttaaatgttaatataataacaaaattagggttgcagtaaataagatggtaatttcaacaataacttcaacataatattgacagtttttatgatggagc

SEQ ID NO: 50417 - DNA, 309 bp, Arabidopsis thaliana columbia
taaattgaaaattttaagtcataatgtgcaaaaaataattaatgaagttttattcaatttggttacaataattcatcaacgtgaatttttttttttgttacgagtgaaataataatctacatatacatttttgcagccattttgtgaaataaatcttgtagttaggatacaatgattgccattggattttaatatttgtttttgataattagaaaaaaaatctttgaattaaatatttgacatttaacaatcttcataaaatctctcgacattaactacacgattggttaactaaattaaactttccaa

SEQ ID NO: 50418 - DNA, 869 bp, Arabidopsis thaliana
taatctataacaatggacgtctatggcttatcttcaccagacttacttcgaatcgacgaccttcttgatttctccaacgaagacatcttctccgcttcttcttccggtggttccaccgccgctacttcctcttcttctttccctcctcctcaaaaccctagttgtccacaaccaccatctcccttcctccgccgatcatcactccttcctccacgacatttgcgttcccgtataatctctctccctctctctttctccaatcaaagtttcgactttgaaataaagattgtgttttgatttttgttgtattttttgtgtgcagagtgatgacgcagctcatcttgaatggctttcgcaattcgtggacgattctttcgctgattttccggcgaatccattaggaggaactatgacttctgtcaaaactgaaacttcctttccggggaaaccaagaagcaaacgatcaagagctcctgctcctttcgccggaacatggtctccgatgccactggaatccgagcatcagcagcttcactccgccgccaaattcaagccaaagaaagaacaatccggcggaggaggaggaggaggaggaagacatcagtcatcgtcatcggagactacggaaggaggaggaatgaggagatgtactcactgtgcatcggagaaaacgccacagtggaggacaggaccacttggacctaaaacactatgtaacgcttgtggagtccggtttaaatccggtagacttgtaccggaatatagaccggcttcgagtcctacttttgttttgactcagcattcaaactctcaccggaaagtgatggagcttcgacggcagaaagaagttatgagacaaccacaacaag

SEQ ID NO: 50419 - DNA, 558 bp, Arabidopsis thaliana
tgagttgtacatgcttaacactcctgttgaggacaggttttcgattgaagaagatgatatgtacaacttccgtaagggttatgcagtcgacctctacgagcatggaattgggccattaatctagttattcgaagttgaaactaaagcaaacttatgtgttttgtatgccttttggaacttgtgtttggttgtgtttacatttacttgtttgttttctaaacagtttattacttttggatgttatgcaacattttatgtagtaattaacaacgtacaaaaacaagatatcttaccaaagtacgtacaaactacgtgtccacgtgtacacagtacacgactgatgtgtatacaggcggtaacattgatttgacatccatcaatgtaaaattaaatttctcattgaatgtaactgtaatttcccaacaatatctccatccgtggttattaaatgggaggaagaatttgacctcttcggagtatctcattactaagatggtcaatccactatttccgcgacttgtcgctatgatagctagaagtggcagacaagctggttgg

SEQ ID NO: 50420 - DNA, 763 bp, Arabidopsis thaliana columbia
aattttataagtagaactttagtaaatcatcatttgcttaattaaaattatgaatcttactatttaacaatatttcacctaaaaaagtcaactgaaaaccccactttttcaagtaaacagaaatgagtagatattttatgactattacatattaccataagtacttgcatatgcaaactgtttcaacccacatagacttttgaaatttgtatcggacgtctcgtgaaagttgtgacgcatcatggctactagcggtgcacgtggaccgtggagagtgacgttccttagagccgtgtgggttcagtttggactttcaggcggacgtcacgggaccgatgccgtgaaagatgtggaaccgttgaacctgaaatcctgaccataaaagccataaccacgggtcccacgtgacttttacagttttcattgatgatatgcttatttgtttggtctttttttgtttgcaaatacactcctcttaattttttttggaagtgacttcgagattaaaccggtttgctaaaccgggatcaaaaccatggttatcaactggttaagaataagagaaagagacaaagagtgaagatgtgtgtgttctcatgtgtgagagtttgttggtgaaagagaattgatacaaccatacaacaacaaattaatactaatactatgaatagtctctgagtaatgttaggataaaactggagagagactcttgactgtacttaattatgtatttgaagtagtttatacgactaaattatggtga

SEQ ID NO: 50421 - DNA, 385 bp, Arabidopsis thaliana
gagagcaagagcttgagtgtaacaacaacaagctacagaagtggtgcaagaaacaggacaagctactcgccaagtgcttcaaaactatcaagttcctaatagataagttgagctgctcctcttccactacagttatcccacagggacaccctcctctagacatgccattgaagagatttgatgagcctgagccaagtcaacacaggcctgagcctagtgagcagagagtctcacatgtccttgctaggcatttatcattcgagtcccgggagcacaagagaagaaggaaggctagcacagttcgctctagcagcacatcatgcctgatacacttgaagagatcctcgaccgtggtgctggccgcagtagaaggagagaggtcgag

SEQ ID NO: 50422 - DNA, 584 bp, Arabidopsis thaliana columbia
ttttgttacacatttttgagagaagaatccaattcttttagagaggattctgatctcttttactattattcttaattcatcaatgcaaactattcagattatgatttgtgtttctattatcgtgtctaggttatcaccttgttgggtttaggaagtctcaatagggatttagatggattagtagatcgaaaacccctttggattattcttagagttcttcatcttgattattcttattgctagtttaagattgatcacctagaacttgatattagataataggtatgcccgccataggtacttgttatttgaactatcatacatgagcctaggcatttaacactacaagaaaacagtcgttttgcgaggaacaaatttgtgagggaattgcaggtattttgctagaccacggacgcacgttgcaaatccctcgcaaatcttgcgagaaactgcttcctcgcaaatgtgcgaggaaagtacgagtactttgcaatgaactatatcatcctcgcaaacacccgcaaaaatctcgcaaatctttaccctaaaccctaaaatacatagaagtgatatgggatctttga

SEQ ID NO: 50423 - DNA, 646 bp, Arabidopsis thaliana columbia
tgaatctatcgtcaatggtatctacctttcgcctattagccatctgatgaatcctagagttgcccttatcaatgaatccatccttaggacttctattagatttatttgtatcccctgttgattgcacttttatctacctgttatttgtatcccgtgttgattgcattttagttctgcctgttggttctactcaacccaatgatcgagtagggctcttaagttctcatttttacttgtttgaatcctgacctaggattgttactagaaacccactatcattataatctggcttgacttagttgcttctgtacacgtcttgattgctagcaataacagtggactggattgacaccccctatagctgcatcgacatgttagtgtctgtaggggaattgaactgaacctcacacacgtttaacataagtaggcctaaaaaacttgcttatcacacccttccctttatctgtaattccagcaccttcaaccatctcagttatctctgcattctttactccttaatagcgagttcatcattaaactcaggttcagatttctccaaatccaacggctgaacacaaagctttttggaactggatgattgttcgagtttgtcactttgtagcataacacgctaagatgatggagt

SEQ ID NO: 50424 - DNA, 490 bp, Arabidopsis thaliana
gtgaatcgtactcccaagggaaacaatggctcacatcaaggttcaaggctatgatattcctcccaagagacggatcttggtcaacgcttgggcgataggaagagatccaaaactctggactaacccggaagagtttaaccccgagagatttatcaatagtcctgtggattataggggacaacatttcgagctcttaccgtttgggtctggacgaaggatatgtcccgggatatcgatgggtatggctactgtagaattgggactcttgaacttactttacttcttcgactggaagttgcctgatgggatgacacataaagatatcgatactgaagaagttggcactcttacaatcgtcaagaaagtaccactaaaacttcttccagttcgatttcagtgatcaaaccaaactccaaactttgaagatgttttgaataaaaatactatgcaaagtatgtaccctagcttctctaatgtatgtgaagtacgt

SEQ ID NO: 50425 - DNA, 1087 bp, Arabidopsis thaliana
ataaaatcaaccaagaaatgtttatctaaaactagtataattaaaacgactaatgttttcttctctcattgttactgtcggagcaaattttcctaaatttggttattagttaattttttttttggttgtgtgattaaatatggtcattagttagttagtgaagaaagagagagagataacgtggcagtagattagtggaagcaggagaagaaagcgggaatgagcaaaggacctggactttgtccatagccaagaaactcgcgtcctcttcttcttcctcttcacctatataaacactttgtcttcgactccaattttccttcaattttatataaaaaataatttgttttcgttttttgtgtttctgtttttctcccttttgttcttatgtttcgttagaataacaacagaaaagaaaaaaagatcgtgagaaaatttcactttgaaaaagaaaaaagtgcagagagagatactttggaaaaattttgtcaacaaagaaagaaagaaagaaagaaagagtgaaaaagaaaacaaagaaacacaccaccctgtttctgtaaaacaagatggcggggaataaagattctagctgggacgatatcaaaaacgaaggcatcgatctcgtaagtatccttctccattaatattcccctcttttacttttgagttagctgctcattcttggttttgaaaacaggagaaaataccgatcgaggaggttcttacacagctccgatgtacaagggaaggacttaccagcgacgaaggccaaactcgcctcgagatcttcggtcctaacaagctcgaagagaaaaaggcacacatccttaaatatctttctctttttgtttcttcactctcaagaaactccatctaaaaccaatttgaatcatcccacaggaaaacaaggttttgaagttcttagggtttatgtggaccctctctcatgggtcatggagctcgctgctattatggctatcgccttggccaacggaggagtaaactaactaacttcctctctttctttttccggatccatctttctcacatttgtatactctgcagggaaggccacggattggcaaga

SEQ ID NO: 50426 - DNA, 544 bp, Arabidopsis thaliana
ccttcgtccagacccgaacggtaagagctcaaaatgttgtcctctatagtccacagggctatcgataaacctctcgggcttaaactcttccgggtcagtccatagtttaggatctcttcctatcgcccaagcgttgaccaagatccgtctcttgggaggaatatcatagccttgaaccttgacgtgagccattgtttcccgtgggagcaaaagaggagctactgggtgtaatctgaatgtttccttgatcaccaagttcaagaaaggaactttatcaagatcttctttggtaattctctccctattgttgccaaggcgatctcggatctcgccttgaactttcttcattatttcggggtttctagcgagctctgtcattgtccatatcatggtcagagctcctgtgtctatccctgcgattattatattctaccaagcacccgaaaaacaagttaagtaaattcatattccatttcaatacaattatacaaatgtgttgaaacattaattaccgtgagaagcccttaatatgatctattgtgag

SEQ ID NO: 50427 - DNA, 761 bp, Arabidopsis thaliana
  unsure (1)..(761): unsure at all n locations
cctttgatggaatcgggaagttttccgaccaccggaagattacgccggacgggctgttcattcaccggagcaaaatttccggcgatctgaacactaggatcagccgttttaggaagcgggtgtagcttctcgtggctgacaaggaaaccctccgccgcgtccaacgctgccgccgccgctctctggaacaaattcatctgtttagtgttggattctttggctttgggcttaacaacaatggcgggagagtttgatgattgcttagggaaatgaagagctggaggagtgtgaagcgcagatgaaacattgagcttacgtgtgacacgactggccataggtaaggagctacaataactcaagtcggagctttgagaagacgataatggcggctgagtatgattgccaccaagccatctcccagaaaccgcagccgttgccgtgaaagaagccatttttcaagtgtgttcaatcagtatttggtggtaaagtaagtcgatttgagatgtgtaaaggctctgttttttttcttcttgtagaagagaggagagaagagagaagagagagttggtttgagagcgatgaagtgttgtgaagggtttatataaactgggaggtgggtaagaggaaaggtggatcccacagtgtggcccgtgttgaatcagtgacagaaagagggaatggagtgagtgggttatagagggaattaaaagggtactttgggaaaaaaaaganaaaaaagggagtgtgagtaatgttattat

SEQ ID NO: 50428 - DNA, 566 bp, Arabidopsis thaliana
ccaagtgttgactaagatccgtctctttggaggaatatcatagccttgaaccttgatgtgagtcattgtttcccttgggagcagaagaggagctactgggtgtaatctgaatgtttccttgatcaccatgtttaagaaaggaactttatttagatcttctttggtgattctctccttattgttgccaaagctgtctctaatctcgccttgaacgttcttcattagttcggggtttcttgcgagctctgtcattgcccatatcatggtaagagctcctgtgtctatccctgcgattattatattctacaaaacacccggaaactatgttaaatcaattcagattccattttaatacaaacgtgtgaaacaagttttgataccgtgagaaaccccttaatatgatctattgtgagcctcaaagaatcatctttgccttgtttatgcatcacatccaacattacatcgacgatatctttgtgatctaccatcttccaggatctgaatgatcatcaatcacacgtctgaacagagcatcgagcttgaagagacattgttgagcacctgtg

SEQ ID NO: 50429 - DNA, 1199 bp, Arabidopsis thaliana
tgtagttgtgtctagatgcctacaaaaaccatcaaaatatcgtcatataaaatttcaagatatttagtatagtactaattaattagggatgttataacttatacttaccatcccaaaataaagtcaagtgcacggtcgatggacgcaccgtcttgtgaatcagcaaggtcatgtgcttcgaaccaagcaggactatgtgcaattccgatcttcccacctttacactatggtcataatttaacataatacaaaacaaactattttcagatccgaaagatgatagataactaattatgatttatatatgtgatgtaccttttcgcatttccggtaagcttcaactgcttctgcgtgagagataaggagattgtgagtgacaaggtaagcctcgtatcctgatcgtccgtcttggcatttagcattgacgtaagaagagcaacgaccaggtgcctttttgcctacgtcatagccagcgtgcgagaaaacccatggctcattgaaagtgatccaatgtttcacttttccaccgtattcttggaaaacaaaatctgcatactctcggaaatccttcctacaatattgcaaaaaattgttgaatataccatttatattcgcatatcaaagaaaacaaaaagtgattggggttcgttttccaacagaaaaacttacacaatcctttcgcttaaaaagccgccatattcatcttctaaatcttgtggagtgtcccagtgaaaaacagtaacgaatggagttatacctaattacagaaaaaaataaaaaattagagaagtttaatacgtaagagattataaatgttttttttttcgtttttaagtgattaatatatgtaaccattttttatgagctcgtcgatgaggtcgtggtagaattgcacaccagcttgactcactcctttctcctttctcccatctgataaaattattgttttgtttcattaatatagcaatcatcgtaaatacaccaaattcgattgacactaagtagtgattaataaataactagatttattggtatatcgatcaatccttatatatatttactcacgaggaaatattcttggccatgcgatagacattctaaaggcgtctgtgtttagattcttcattagttggatatcttcctgcaaacatttttcagatgagaatttttttatcaacatctagtctaaatgaataatt

SEQ ID NO: 50430 - DNA, 516 bp, Arabidopsis thaliana
gttaaccccaactcgactcggttttcctaacgagttcccttacgagttcgactctccttccttctcccctggtttcacttctcccggtgactccactgagacggaagacgaaagcagtgatgacgaggaagacttcctcgctgggttaactcgccgactcgctccttcgactcagcgtcttccttcccctctcttcaagtctgaggtaagaaacgccgcaaagatctttgctttctcgttaaactataaacgcccatggttactgattctgtagtttcttgctctgcaggagaaacgtcaagttgcagctacttcaccacagtcaacactgagtggactcggaagcttttcaaactcaggaagtagaagccctatccttccatctccaccggctcctacgtcatcatttcgtagagacaacgcgtgggatgtgatttctgcggctgctggagaagtcgctagacttaagctcggaagctacgagcctcatcaccttccccttcaaacccctgagtc

SEQ ID NO: 50431 - DNA, 544 bp, Arabidopsis thaliana
ctaaagaaaccaaagccgccgaggtagtcacgcagtttttgttccagctcctgcggcgctaaacgtgccagatgttgaataggtgattcgtcggcgcgcaggtattcaagttgatgctgggcgaagtagccgagtttgatccctttcgccagaccaatttcaccgctgactggcgcaagttcaccggctaacagtttgattaatgtcgatttacccgcgccattgcggcctaacagaccaatacgcgagccgggcaccaggttcagtttaatcgagtcgagaataatgcgatcgccatagcccgcgctgactttttccatcttcagtaacggatttggcaggctttccggcgcgcggaacgtaaagcggaacgggttgtcgacgtgcgcgggggcaattagctccatacgctcgagcatcttaatgcggctctgggcctgcttcgctttggtggctttggcacggaaacggtcgatataactttgcagatgcgctaccgttcctgctggctttcgtacatcgcttgttgctgcgccagacgggt

SEQ ID NO: 50432 - DNA, 581 bp, Arabidopsis thaliana columbia
tatttaatagcaaccactcaaaatttttttttttttattgaatatcttgattgtctattcgaagactaagtcctcctaacccacctaattccaaagaaatttcccattgaaaatattatcagataaacaacaaagaaaaaaagaaaccttaataatattttctttctttcaactcatataaaactatgacttagacaaacacaattcaccaattcctaatctgtcttttacctcttattctttgtcttcattttcttgttcatctccaagaaaaaaaaaaaaaacaaacagaggagatcaccatgatcaatctttctctgtctctgacaaaatcttggtccaatacaatcatatggatgctctttgtgacccctcttgtgtttctcagttgttgatgagcaacacaaacactgcagtcctaggtttaaatgcggaaaccagtcagaactctattatcccttttggatatctgagagaaaagagtgcggtacccagatttcgaggtcaactgcagcggagattttgcagacgttactgtatccacagttaagtccaaacccttgagatgactatgagtttga

SEQ ID NO: 50433 - DNA, 577 bp, Arabidopsis thaliana columbia
gtgaatccccggcaagtcagatgtgaagaaatgtgggaatttagttaatagagtatgattcttctgccttagattgttctaattagaattcaggttccttttaagatcgaaactgtagtgaaggcattgccttgtctcatattgtttgaaatggtggtttcactgtattaaaacctaagaatacagttagcagcctctgtctagttgataaccaacctcttttcgtcgagaatctacatttcatgtatataactttgagattccactttcatatactggaacttggaccttgttttcaatggtcatttctggctcccttgacttcaaccttgagtattattatacagcctagcaccaacaatatctaaaaattggagatttactcgataacaatacatgcttttataaagcacaatacatggtgttgtcaacaaccttgagtagatgaatgccttctttttattgctttgtgtgtaacttgtaatattatctactcatctactgactaaggtcgttggttggttctctcagtagattttgtgatttgttttgtcatatgtgttcttatcagacttgt

SEQ ID NO: 50434 - DNA, 404 bp, Arabidopsis thaliana
acaataatcgccggtccaaagccctactcgcccgccaggagcaagacttattcaattcgaagtcccgtgattagagacctccaccaatgcatcgccaacaccctttttccaaagaagactaccggatttgttggtggagaagagctatgcatgattgatcaagctttggtcttcattctgaggaagaccaaggatgggaggaagatggcgggtgatagagcagacacttcgctgactattgttcttttggaccacctattgagctatagacaatatgctgcaaccatccttcgcggaagtcattgtgatggtggtctcttaacaccaatcctaggagctgtggggataacttgggaaccctgacatgttcccaagttctcgactcgattatctcaggggaaaga

SEQ ID NO: 50435 - DNA, 587 bp, Arabidopsis thaliana columbia
ggtttggaattaagaaaagtaaaacagtaatgaaaataaagagaaacaaaagtaaacaatagcaatcgatggttgtgaaacaagataataaaagcgtcaacttagggtattctcaggaaatagatgatagtagatctagaaatatctaagttattatcaaaccgttctcgaactcaaactatgattttagagtaaccggtggcgttccgcgaaactctcgatgactatagttaagaataaccggagaagccaaaagatctttaacttaaacatgcattattatcaagtttgattagttcacctagtatctaaaccagagcccttctatgagcctacctgttctttcttaaatgcctaggctcatctatgatggatcaaatagcaagtacctatggtgggcatacttattatctaagaacaagttctagttagctactctaaaactagcattaagaacaatcaagatgaagaatttctacagataacctagcaagggggccatctactaaatcatctataaccctaatgagaaacggtaaacctaacaggaaaactactcaagcatgatgaatgaagtaaccacatga

SEQ ID NO: 50436 - DNA, 388 bp, Arabidopsis thaliana columbia
agaagcggtttctgaagaagatgttgagatcatcgaggatgatacaccaacccctgttgtgagaagaaaccgtccaatgaggaagagagaaccaaccccgagcgagtactatcaatatttgaaggagttgaagtttgagggaactagataccctcataaggaaacgatgcaagagctagattttgtggtgatgtggaatacttgatggaattggccaatcttgcaacattcatgagctgccaatgtgggggatcaaagaggagagctgcaactccttgcaaccctcaaggttcattgtggtgttgatgattcggagaaagaagagagaggaggaggtcttgggtacataactttcaaaattagggatgtcgaatatactcttgatatt

SEQ ID NO: 50437 - DNA, 449 bp, Arabidopsis thaliana columbia
gagttacgtctaaacaatgaccataaaaatcaatatataagtttctaaaacgtgatgggccttctttagtaataagggaaagttatgggccgaatttggaaatcttcaaaacatcaataggttgcgcaattgaattgtcgtcaagtattggtgtcgctcggcacctacatgcatctttgtctccgggtttcgtcagcaccataaattctctgtatccctctagaatcccccattacctccaaatgaatctcaaacaggtaaagacctgaaaatgactagaaaagactctagaaataacgagtagactctaaaacctatacgtaaaacatagctaaaagcagtaaaagtaggatcgtatccgtttatacttccattgatcattagtaatttatttatccgtctgaatttagaccaaggaagagctgccgattttgaagacaccctcccaa

SEQ ID NO: 50438 - DNA, 477 bp, Arabidopsis thaliana columbia
tgaaacatcatggttcattcaaacacatagaatcatcaatatcccaacacaatctctcaacaataaacaatagcataagaatctaaagatcacatatgcaatcggatataaccattcacacgatccatataactcacgaaatcaatcaagaatgcatgagaatatgattatgaaactcaaaccattatccataactcactcagtaaccaacagaatgcgtgcaacgattcgggcagagttttcggctacaggaccttaacttgaatcggatggacggttttcactcggcagcctctcacttttgctcactttctcttcacaaaacaattggggttgagttggtcttatataggcaaggcaatggcgagtcagcatgtccatgtctcaggcgcatgggcatgtcaaggaaagttcatcgatccgcccgtggtgacacgctcgtcgctctagcggttgagcgacacgtggccaccaaac

SEQ ID NO: 50439 - DNA, 567 bp, Arabidopsis thaliana
tcgttggaacaaaaaagactttctcaaaggtagagacgattctagcgagtatccacccgaatctttgacagggaagcaagtttattacgagcggttggctagtgtaaatccacccaaaacgaaagatgttggtgggaacggtcatgaaaagaagatgcgagactatgggaaggaacataattggcacaaagaaagcatattgtgggagttgtcttactggaaggaccacaatcttcgacataatattaatgttatgcatacagagaagaattttcttgacaacatcatgaacactctcttgagtgttaagggtaaatcaaaagacaatatcatgttaagattggatattgagaaattttgttctcgaccaggcttacatattgatagtatgggtaaagctccttttccatactatacattgacagaagaagccaaacagagtttatttcaatgtgtgaaacatgatgttagattccagatggttatcctcagatttggctagttgtgtagatttggagaatggtaagtttcaagcatgaagagtcatgattgtcatgtttttatgga

SEQ ID NO: 50440 - DNA, 532 bp, Arabidopsis thaliana
tgccttgcgcggagtactcttcaaagtaaaattgttgtgttgcgtaagactcgtccaaaggttctgcctcattatctgaatgatggattggagcatcatcatcattcaatctttccatcggcacaacttcatcacctaaagtatagaggttctccactggtggcaaaactcaatgttgccaccatctttgatcgaagtggaagcaggatttgggaggaaaaaaatagattgtcatgctgcggggtgatcgaacctatatttataaaggccattcttcttctgcgaccaaaaactcttggaattaataaggtgttgcatatcaatccatctcggaggaatcggctttgaatgcagaggtacattgcatgctctcaaaattagggtcacaactcctcccacaaccattcttccaggtttcttaaatcctttagcccatcctctgtaactcagtagatgttcgattaggtagaatgagactaaagcgtttgtctgatcgccagctagaactgtaccatatgatgctaaaccaagt

SEQ ID NO: 50441 - DNA, 630 bp, Arabidopsis thaliana
cagatcttatctcgttggattgaaggttattgttcacacagatcatgctgccttaaagtatttgatgcaaaacaaggatgctaaaccaagacttttgcgatggattttgcttcttcaagaatttgacatcgaggttagagataagaaaggagttgagaagtgtgtagcagatcatttgtcacgcattaggattgatgatgatgttcctattaacgatttcttacctgaagagaacatatacatgatagatacagctgaagaatacgactgcaaatgtgataagttacagaatcgagtttcattgtcgatcgacaccccttctatgtcgatcgacactcacatttcagaggaagttgatattcgtagttggggaatggtgtcgatcgacaccactggaactgtcgatcgaacccttccgaatcgacaagaaattggtcaccaactgagaattgcgccgtcacagcattagagaaggactcccatggtatgctgatattgttatttacctaggtgcagatgtggaacttgataatttcatagattacaacaagaagagattctaagagagattaggcgatattattgggataaccttatctcctatagcattgtctgatggagttatagaga

SEQ ID NO: 50442 - DNA, 328 bp, Arabidopsis thaliana
tacctcttgatgttactttttgtgaactgactaaccagcacaaacgaaccatctgagctcactgcacacccggctgaaccacttagcccttccatcagtacagtcacgactttggtcgatgggtcgtatttgtagagctttccggtcgcgtcctttaaccccaatgcaatcaacacttggctgcatacataaccaataaacagaatattccatatatagcaaatattatttgagaaagtactttctttaccaattaaaatcaatttgtggataaataatctggcatattaatctacttactgtggaaagcagtaacaaacatgtaaag

SEQ ID NO: 50443 - DNA, 602 bp, Arabidopsis thaliana columbia
caaaacactactcaaaatcattcagattcatttattgaatcattaggaagttaattatctacattagaatctactttctcatcatatatttcgaatgtgcattttccccaaatacatcaatgatgatcttatgtttttttataacttgaatcaatgtttataactttttcaaaatgaaatgttaatattgaaacatatacaacattttttgtgcattaccatatactctacttgtgtgattatatggtcacttagattcacatttataaatgaaaataaaatatcgcaaaacacttttatgtattttagggttaagggtaaagatttgcgaggtgtctgcggaagatttgcgatggtgtatattgttcgccgcaaaatactcgtacttctctcgcaattttgcgagtaaactttccttcgcaaattttacgacggaagtgcgacgcgcgttcgtttagtaacatctgcagatttaatagacagaactttacccaataatctttttccttgtgaagctacaagcatagtataattcttactaccatttattcctttagttccatgaaaactagctaccttagttttctgattcttattattta

SEQ ID NO: 50444 - DNA, 1203 bp, Arabidopsis thaliana
ttattatgtactcgtataatattcaaaatactaattgttgattaatgtatgtataggatgtataaatgtaatcatctttaatttaacaaaatagaatgtcctaaacaaacattgtaacaggctaaacacacgctagcattaatatcatccgcattgctgtcaaatacgtgtggagctatacaaatataagaatcatatttaactatgtgttaattttttatttttcatttttttgtttgtctatcaaatattaacaaatttgattcgatttacttcaggaagtcttcgttgtgcgacggagcacttggaaccactaacgtcgaaaaatgtggtcgaccagccggaatagccttcaacacgaaaacaggtgatctttacgtcgcagatgctgcattgggtctccacgtcatccctcgccgtgggggtttggctaagaagatcgccgacagtgtcggcggcaagccctttttgtttcttgacgggcttgacgtagatcccactaccggcgtcgtctatttcacttccttcagctcaacatttggccctaggtacagttttatttttcccttctatacgtaaatatataaatacacttatcatataatttatgaacaaagtaaatatttctattttaatataaaaatcatcttaaatgattttttccctttctaagttttgttttttaatcaaatcgaaagtttttttttgttgctgtgatcactcaataaaaagcttatagtgtatttctttagttagagccaaattaattttgatgctttttgttctaattacgaattacgataaaccattttttaacattttcatttgaatcggttaattaatcaaatgatattacttaattactaatattgattatgatgcatatgcagggatgtgttgaaagcagtggcaacaaaagactcgaccggtaagttcttcaaatacgatccatcaaaaaaggtcgtgactgtattgatggaaggtcttagcggctcagccggatgtgccgttagctcagatggttcattcgtgctggttggtcagttcacaaaaagtaacatcaagaggtattggatcaaaggatccaaagctggtacttctgaagacttcaccaactcggtctcgaaccctgacaacatcaagaggatcggttctactggaaacttttgggttgcttcggtcgtgaactcagccaccggaccg

SEQ ID NO: 50445 - DNA, 412 bp, Arabidopsis thaliana columbia
agagggtggcgcaccatcttcttgacatccaactgaaaatccatattgaacatttgttggagtcgttccgcttgaaccaccttgttgaaaattttctgtttgccgcaattgtggagcatttggtgatattccccattgtggaacatctggtggcgtgcctactgtgcatttggtggtgttcccaatgtggagcatttggtggtgtctgcactgtgcaacgtttggtggtgttcccactgtgcaacgtttggtggtgttctccactatggataaatgggacccaaaacccgggtgaattttgccccccaaattattactcactaaggatggacttccagatgatatactcctgaatgtggaccccaaatgaatggcatgacctaactattttggccattttggttgttgcgtg

SEQ ID NO: 50446 - DNA, 1413 bp, Arabidopsis thaliana
ttttttttttttttgttcccaagaaattagaacatgattgtgattacacaagtaatcatgaccatccgtatggaagctttcaaagatcattatggtggccagaaagtttctccttaatcttcttaaagaaacccttcttctcgtgaaccgatcctgatcctgatcctgttacggtcgcagctgatggcttgtcgacgcctagcttcgattttgtttcatccgttatattagttttcctccctactccttcgccattctcctccgtctacatttttatacgtaccatggacagtgaatcttgataataatttttaaaataatatacacgcatacataaataaaaatgaaatggatgtagaatttctactcgcaaactattagacaattgcgttcacatgcttttagaacttacttacgagtgatacagatattgaatctcaatacaactatgtaatagatatttaatcgtaccgaactggtgccgaaccagcggagatcatggtcttgaagagggtcgtgggacacggaaataggttgtgcgtggtgaggagtattggtggtggtgactggggcagtgattgggtgtggacctgtgtagctgctctccttcaggtgaggaacggtggttgccacacctgtcaaatgcatggcgttaccaaactcgtccatgagctgagctggctccccgtgtgcgtccgtgagatatatcggatttcctcgttcgtctttcagatccgccattctcttttcctaacactatgcgtttgcgtgaacattatatgtactaaacattaatcatcattcatgtgcatggtcatgacacgtgccgcagtaacgaatcaagatgcgtagggtattgccactaagcacatgcatgatctttaacgaacgaccgtagtcgataatgattgcttgaaatcgatttctctgatttctatataacccgtgtttcaatatttgcttaatattggtagtagagaaatgatggtgtaataattcacgtataatattttaaaagcttatcgatctgtctatttattacaatcaccaggaatagagggggaacaaatccaaatttacctaaaagaagtttgatttagaggtcaatctggtagatattatactttacaaactatacccaatcggctgccttcagggcccagttctgatctatgcatagccagaacaaatcaattgattaatgatccaatgttttatttttttttgtccccaaccttgtaatctaaatttgtaactttacatgtgtgaaaatttagtattcattaaaaaaaaaaacaatgagaagactttgttgagcaagtgtgtaacagcaaatagactgcttttaactgaatggtatcgtgccccggtgtgtgtcgacttctatgcttcagacagcaggtctcccgggta

SEQ ID NO: 50447 - DNA, 1099 bp, Arabidopsis thaliana
atttcgaatgagaaagggccaagcaagaaaaactgaagatgtggtgatactcgcacatacaatcgcgtctccgattgagatgttatatgggaaacgagaaacgatggaagaaaaggaaacagaagagaagagagagaagtacggccgacgtcggagtcgacgccggccggagataattatcgaaaaactgtttctctgtaaaaggtcgccttctgtgtttgttaagagtcttcttattcttatgcagctaaacttgtctagcaacattgcatatgtcagctaatcttaaaatttgaaccttaatttaatagtttccaaacacatgacatgagacgttgtagcaatttattggtttatgaatgcccgtggatatcataaagagcactaattttgtagtagaactagaatttattccacggtacatcgcataacaattctttatcttctattttgcatctacatgttatatttttagtttataaattaattattaaactacagatgatttcagtttgtagtgtttttttagaataaagtcaagggattacatgaacataattgacgtagttgttgtttgttgtatgcccaaataattgttatgtttagaagactaatggtaggtgtcaattgtttggtttggagggtgaatctatacaccatgtcttgcttgctctgttgctagacaagtttgagccatgtctgactttcctgttcctgagtgtggttttgaagataggtctccttttttcaatatctatcatctcttgataatagagataacttgagatggcctaaggaatttagaatgagttttccatggatcatttggaggatatggaaaaagtagaaacaccttcttctttgaagataggtgtttctctgcttttgattctgtgaagaaaatcagatgtgatgttgaagattggtttccctcaagttgttgaagaagacagaattttaattggatagcagaatggtgtggaggataggcctatttaggatcattgtttgagtgtggttttggactctccgaggtatgattgggttagatggtagtaacattgcctctcttggtcgaggaggaatttttagcaggtgt

SEQ ID NO: 50448 - DNA, 735 bp, Arabidopsis thaliana columbia
taagactttaagattgatctcacttcatgaaacacactgtccacaagatccaaaacaatgaaactgaaagactaaacttgaagcaatcaatcccaaactcatagcagagacattacaacacctaacgattcagaatcctagtcgaacatagactaatacaatgccttagaaaaacttaagctaattcaacacaaaagtgttaacaaattaacaaggtatcttctctgaggtaagactagtggcgataacatgtcatgaccacaattcttagccgtcaatgttagccatgtacaaggaagccatgtaagaaatcaaattccaccatgatcgaaactcatcaacctaaaaaccctatctattcatcatacattacgatcaacaaacccctaagcaacttcatacatactccaaaatcctaacaaaaccacaattccagtttcatatataatccaacaatcgcgtaataatttacacacaaattaagaatccgatcaaacaataagaactgcgaacatttcctgattcgaacacaaaaacacaatgagattgaacaaaatcctcaccgattagaaaacgaaaacagcgagaagaaccaaaagcgatctttgaagaaggaaaatgctgcttcaatggacgacgaacaatctcgatcctgatgctataataatcttgttatcttctcaaatcaatgacttggctatgagaatcgtctctgtatactaacttgtatgattt

SEQ ID NO: 50449 - DNA, 466 bp, Arabidopsis thaliana columbia
ctaaagtaacggcgaggtcgttccggcagtggttacgcacggggaagtagacttttatcgcggggagattccttccaggcgcgatgtcgaagaagtacacgcatcccttgagcatgtccggggcgtcacgaatgttggggattatgctgtcgccgttgttggggacgtatggaaactctgaagtctctgggaaatcagcgtgctcctcggtaacagttttaagtaggttgaagagctcggagaactgttttgtgcgggtctcagtgtctgcgatacggccgcctagggtcatgatttcgcgaatcgctctgaagttggtgtgcgggctgttgaaataccactttatacgggcttttgcgggctgcaattgtctacgctgagacagaatggcttcaggagcttgccttccggattcgtgcttaggaattcatggacagctgtgcgggatggagaatttggatgcaat

SEQ ID NO: 50450 - DNA, 658 bp, Arabidopsis thaliana
agactatacaatacaagcctatgaacttttgcaagaaactccctcagcaaagcagctacctttcttccttatacttggaagtgttttcaaggattcaagacatattgaaacatgcctaatcaactaatttagccaggtggttatctagattctctaacaaatgatgtcattgcgacacatatcattatgaaaacccataaaaacttagtactagtgcatcgaactttccaaagcttattgctcaattgaatctaagcaagtcaaggtttttctatcaatcagacactggaaagtggagtgctttaaagcaagcaagcaagtagagtacctctgcacatcaaatcctgacaatcctttgatgaactttagatttctcagcatcgataatcgattccacgcggttaaccgcatcatcaagcctccctttggcattcaccacaacgtaatcaaagttctttagatgcctaacctcttctctcgccgtagcaactctaacaagcaactcctcttgactctccgtcttccgatcaatcaacctctccaccatagcaagctcactctccgccacaaggaatataaacacagcagagttaccaagtatcctccttaacgtctgagctccttgaatatcaactctaagaacaatgtcttccccttt

SEQ ID NO: 50451 - DNA, 841 bp, Arabidopsis thaliana
caattaaattcacgaggtttctgtgatgaagacgactaagcatttccacttcggctaagaactccctgctaccttgctggtcatctctcttcaataccttaactgctactttagttccgtcatcgaaaacaccttcgtaaactcgtccaaatccgccttcaccaagaaccctcgattcatcaaagttatttgtagctttcattatttcacttgcggtgaaagtctttgcagagagagtaaacggagcaatgctggattcaaatgacaatgaagttgagctaaatcggcttccagttaaagatctcgccgagcctgcaaattcagataagttatttcatgtttcttccaagagcaacagtagtagtaactagtaaccattttttacctgatggtttcgagagggaaggcagtgaagggcgagcaagtggtgttcttttcgaaagacgtcgtcgatctctttgtcgccggaaaaccaagaaccaaacgataacgaaacataaaccgataaaagcagctgcggataaaacaatcacagcaatacttccaccattgagctctttcttgcgcggcttccttggaacatcaactccgagcggtttgaccgccttccgttattattaccagagtacggtccttgatctataatggtcataccagaagttggcggggaagcgggtaaaccaggataacgcacgtaaatcacgtcgtatccgccaaagattggttcatctatatagacttttttactccagaatctctggtaagtcagcattgcagtcatgttatcgaatttatctccaagcggtactaaatcgattagaacaatggatttctcaggttg

SEQ ID NO: 50452 - DNA, 946 bp, Arabidopsis thaliana
caaaagaaaacatgctttaaaaaaagaatcaaagatgttaaaaataactttccactcaaataatatatcacggccaaaaaataattaagaatcataaagtctttgattgaatctaatttaatatcttcacaccaaactcaaaaaaatctccaacaaataatattcacgtgcaatatcaggctcatgacagtttcgattagagccacacatggaaataattaaaagtgaaagcgcgtctaatgaataatgtgttttacacctaaacctacgggtcctaccccaaaatgataagacttaactattaccaagaatcctctgtttaaagttcatgtgtccttggtattcttctccggttcgatctcctgcgttgtacgttggccttcggtgatactagacgagcctgatgggttctgaccattgtcgctagtcaaaccactgcattcgctgctaccaaatgttttgctttcgaacgccattttcttgaatttcttcaagtcttctttgtattgtgttgagctataatctgagctcccgtctaagctgtaaatagtactttgtcctggggcagctccttctgttaggtcatctatagatatatttccttcgaatgctcgaactatctgcaattgtccaaagaacaatgacaccattgaactcacaaagtttcattttttatcctagtgttagattgaatgttgccaaaaggttttgatgtgatagttagtacctggctcatttttgggcgacgtttagctgaatgacggacactagcagcagcgcaacgaaccattctcgtcatttcgttgatatcaaaatcattctctaaccgcgggtcaacaagaccgtcaaagtttccatcgtttaacgcttgtatcatcagaggttttgcctagagcatgaggtaaagtttaaaagcttattaaaagtggtggtaagggaacaagat

SEQ ID NO: 50453 - DNA, 1003 bp, Arabidopsis thaliana
ctgcttcttcgtaggatttatatgtacgccattctacattttcaaataaccctttagttgcttccgtccgtttcgtccatcaagatctggacaccacattcaataatgcgagcgtaaccaccgaagaacttgagcattatctttcgtccattaaaaattaatgggaagctaatgtcaaatataaagacatgttccgtttggaacgtgtagacggtttgtagttggaaatcctcggaagcggattttactgagtcgccaatgactctgcaatgacatgcaagtcctagttcgtaagctttgtaagactcgaattcttcgacatcgtctagtgaattgacaacacaacgcaaaccttaaatctgttgaaagcagaaggaggaattgttaagcaatttcctctcgctcggtaatcgacttcttcaagtacttctcttgctggtaagataacattcccatgaacaaacgattgttgaataatcgctcgtcgtgcttctctatccaatgtgaagcatttgatgaaattgaactgcgcatttggaatgtttagagagtcacttactctttctagtgatgtacaatcctctgcaaatagacactcgagcgaacaagggagttctggcaaagacacaagtcttttgcagcctgatagtttaaggtaatatagattatgaagatctttgatgctatctgtaacccactcaataccacaattgcttaggtctagcttccttagacccatggggagatgtgttgagaaggtcttgagatttctattggaacatatataaagagtagtaacaccagtgcaatgcctaaatgatgcaggcaattcttgtacccctgttttctctatcacaagttcctcgaggctggtgggaacatctggaaaacttttcaaccgtgggcaatcatgtatgttgataatcttaagagatgccaagttgatgagagttggaatgacttctagactttcactgattaactaacaacaacaatttcagta

SEQ ID NO: 50454 - DNA, 560 bp, Arabidopsis thaliana columbia
gggttatttggagttatcgttgggattattatgtcagctcaagctacatggcctacaaaatagagatatataaactggtaacttatggacttgtactctatagtctatacattctatgatctatttttcaaagttccggataaaaattacacttctttgctgttatatctcttgtgtagaagaaaaaccatgtgtgattaagattctccttgagttgaatccctattttttggtaatgttcaaatttggtaataagtcacttggagaaacctcttcatgcttgtactctttggttctcttttgacaaatgataagagagtctgtaaatttttgatgagcattgaatgagctttaaactctgcaggcttctgttgttgtcaaactcagtttattgtatgtgaaaggaaaatacaaaaaataacaatacatttttcatgctttactaaatggcgtcaatacattttacatgctttacaaaatggcgtttgcctttacaatctaccaaaataatttggtcaaaaacattacaggttgtgtgttcgtttcgaccatatatagat

SEQ ID NO: 50455 - DNA, 783 bp, Arabidopsis thaliana columbia
gtaacggccgccagtgtgcaccagagaatgctaccatatatcccttggaagcatcctggaatcacaaagtatcatcagacaaacaaataatttgataggctaacacattcatgacctctacttccgaggataaacaaaaatcgtatagtaatgttcgggagaaactgtgacgaagctactactaaaatcactttttccagaggtatctacactgaaagtctaatgatatacacattacaagttaacctgatttccacctacttcgtcagaaaccaaactcttaatctataggaatctaacatggcaagtctctgttttgaacctttcatctcactgaaacaaatgcagaaaggaaccagatcgtccaagaacagagcttaaaacctaaaccttcgttacctacgggaaaattgaatctaccaatccaagtaatctcgacaattagcttagaattccagagctaacattctaagccaggatttagacaagtcaactaatctgggcatatgattccgatctatactaaatttccttaagagtgacctaatccattctaatctgatcaaaaacctgcaatcgaaaccctaattcaccaagataaaccagagatgagaacgaaccgggcggaaactggaggaactagaggtattgatggtaaggagtgtgatctcatcgactttaggtctgaacacggcgacctcagagtttccgttgagcgagagatggcgatgatcgcagggagagtactgaacggatttggatcgatttgtactgaagaaagaa

SEQ ID NO: 50456 - DNA, 719 bp, Arabidopsis thaliana
tctaatcaacagaaatatttttgtatatcatgacaaaacctctatataaataaagacaataacattctcaaagatataaatttccaaactctctcacaaaccaaaaccaaattccaacatgaagaagacctacaagcttcaaagcctcttctcttctctcatcttcctcataatcttgctattgatttcgagagccgcggccgtcggtctggcggtgtctgccggcatccaccatcacaaaacagctgcaagacatgcatggcggactaatgaaatacgactgccctaagtgcgtgccggtgctccgatgcatggctcgttgtctttggggcggtgttactcagaggaagtgcaccaccacgtgtcgatgcgacaccgcggccaagccgtcgttgctggagtgtaaacgctgcgtttctaggtgtaagtgtagctgtgcggcttaggaacaaatcgagtaaatgctctcttgatggtaaaataatatgttaaatgttaccatgttggatctttgtctctttaacttgatgttatatatgtatgttgaatctttttgtcgtttaacttgatgttgtatacgttgaatgctaaaagtatatagttcctatttatagtcatatatctaagagatatatcacattattcttttttcccggtcaatatagcacacacacacacatttgatgaatttgattccggattatgacacaagtattttg

SEQ ID NO: 50457 - DNA, 519 bp, Arabidopsis thaliana columbia
cttctttcaagtcatatatcacttgtgagtgtttgttaggtcttatttcgattaagcttggtagaaagtgttaggttcgtaacgacaaagatagtatctcatatagttctagttcgcgttatccggactagataagactaggtggatacttatactaagggttgggaagagtttaaatgagaaaaagggttgggtttcattgtttacaataaaagggaaaaggattttaggagaagtaagctaaagaagttagaaaaagtctagtaaagggtttgagattgttaaataaaaagattgggttattgttagctaatgaaaaagggtaaaaaccttaagcttaaaagagattaaaaacagaaccttagtgctgaagaaagccaaacccgctagaaatatcgaagaaaaaaaaaagattctcctagagttaagagaaaaagaaaagaatgggttaagaaagagtttaaaagatcatgaatgcaaagggtagagttaagttcttaattgggatgggagatggga

SEQ ID NO: 50458 - DNA, 495 bp, Arabidopsis thaliana columbia
  unsure (1)..(495): unsure at all n locations
aggtcgactcgatccccctctccccttataaaaaaaagaaaaaaagaaagcaagagattgatatgattttcggtagtgtacaggggtaggaatgtttcccatgacccattattatacattattaggaatgatcaattacaaaggttagaaatatgccgagggtgtcaatccagtatgcgagctcccctttgtttactctttaaaaagaataagtctgggggagagaaagaacaccaaaataaaataaaatataaagagtggtcaatttatcatggtatagtacaagaatgagtctagaaggttcttgaatattagcttgcttgatgagacccagcgatgaaagcctggtggatatagttgtggaacttaggtatggaatctagaatgttgtgtatgcttgcagagaagtacatgttggtaaggatttgattagaactgctacgcatatggatttggttanaatgatcatggcaatagactagagaatattgggag

SEQ ID NO: 50459 - DNA, 472 bp, Arabidopsis thaliana columbia
gggataatttattgagcttgtcaatcacctataaactgaggaaacgaaactactcaattaccccatcctcgggagtttctcatccaattgatttatttgtttactttgctgttgtttactgcatcttgttatctgttgcttagtttttgcgtttctctcctgttactcgacctgctactcgaccactcagttgtctggcaacagacggtgcagtcgagtatccctgttatacttcatgtctgttactcgacctgtcactcgaccacacccagtgctctgttggtcgagtgcttttactatactacttgaatttctggtttctacatgttcacttaagactgctagaacacaccaaaacctgttattgcttggatcgacctagtgactattgatcacatcttgatcgttagcatcacacccagctcggattgacaaccttcagtactacaacgacatgatagtgcattaggat

SEQ ID NO: 50460 - DNA, 617 bp, Arabidopsis thaliana
taggttgttattcgcttatctcccttcattaggtgaccgggcttatctggcccaaatacccattcgcgtatgtgggctcatcagctgcgtaggtcctctacttggtgggcttggtgggcttttgtgggctagcttggtattttcgcaggtggattcctggaggggaatccagctccaacatttgccccccagcccattgagtgagtaggcaaactcgatgagcagacatataggtcatgtaagattgcgaaaatattcttgatgagatgataaatgctataagatcagtcggttttgaggataaactcaacaattttgatttaatttcagattccttaacccaaagatttcgaggagatacgcgagataagtcgctgctgatgtggacggccgagatggagcgtctcattcagcgaaccgcatctgacggtccagattaggcgcagagaagagatctctacaatctcaaaaatcgtggtgatgatggctttaaataacttcccacctctccacttgacgtcacgttaactcacacgactctcaaggtaacttctctcctcctttattatttactgcgtttagttttgtagagatagaaaaatctcgtcctttttttt

SEQ ID NO: 50461 - DNA, 517 bp, Arabidopsis thaliana
gtttcgaagatttggcttttgtcttaaaaagttctcgagaagtcgtggcaattggcacctcaggtctcaggttggagctgagaggttcagtcctagaggatcccgctcgaaagaggccagcgaagtctggatctttatcggcaaggtagtcgaagtacacatcaaagttactgagcttctccgcttggtttgcaataagagcttcagcggtaggcagcttttgaaagtgttcaaccggatcttctcgaggaacagaaggaccaatgtgagctgatgaggcttctagctgcaatgaacatgccccatatatcctccctttcatctttggagccacctaagagaaattctaaaaccagaaacaaatgtcaagtcactattacataatgcaaccaaaacacacacacacaaatcaagacaatgccgggaaactattacataatgcaaccatgataacctaagtcacaatgccgagacaaatgcaccacaacacacaaaaaccaagtcatgacacaacact

SEQ ID NO: 50462 - DNA, 561 bp, Arabidopsis thaliana columbia
aggaagcacgttccggatcctaatgctatcatacccgagccgatacaagagttgaaaacgaatctcacctttcccgaaatccctcttggtactggtgaaagaagaatgcggagataaagaatagaaggattctacaaattcaagtgttctggggaaggcaaaatcgtaaggttattacttgggcaaatgaggaaaagttcctcggacaaaatatccacagtttttcgaaccacggaatgctgaggatgaagtcggaccgtctaatccttctggaatttgggacaaattctattaaggggggggggagaatgtagtgacccgcgtagagacatcggccacaagcaagagtccaaattttagaaagttgcccgaatgcatggccaattgaccttaagtgcccaaaacacaatacactatcaaagggacaatatgggcaagtttgggcaaaaatgggcacgaatgggcaagtttgggcaagatcgggcgtgctgcgggcaaagtttgcccaccaggcgttgaccgacgttgacgcgcaaggacgtgtgcacggctgacatgggg

SEQ ID NO: 50463 - DNA, 579 bp, Arabidopsis thaliana
cattctgtcctgaatcccaaaattctgaactcctgttgttgatttccctaaagcttctctgatgtcaaacttcatcttgatgcctttttcaaggttcagattaatttttccattcctgacatctatgactgctccagctgaagctaagaatggtctgcctacgatcaagggatccttgccttcttcatctacgtccaatacaacaaaatctgtaggtagctcaatatttccaatcatgacaggcagattctctattagaccgtgaggatgtgcaacagaaccatcaactaagagtaaagctaagttgcagaacttgtattccatgatccctagccttttagctgtagagagaggcataaggctatcgttgtaagaacaatcgatcttgttgtgtaattcagttatcttcttgtcaaaagccatggctcctatagcttgtccttggatgatttgttgaataagttacttaatttcaggatcttgagctactgggcttattgtggttgttgagtgaacatggtggtggatctgctgttggtagccccattaaactgttgtttagggaaatacccgtggttg

SEQ ID NO: 50464 - DNA, 568 bp, Arabidopsis thaliana columbia
gttcattgcttttgcacaacgtatcaatgtagttataggtagatgtgtgcaaaaaacacaaatattgtttataaataaaattgaattgtaagtatatgtgtaatttgagtatcaattgggtgggtgggtccttctttgattgtacggttcacggttccatgtggctcacgaatgttgtaattgacgctttggcccataaccatttctatcttttgattttttttgggtcccatttctaagttgataacatggccaatagtgtatttgtttttgttttttggtctttgatactaacttttaacttttcggtagtacaactaatgtaaggattagcagcgagaatctgaacgaatcgtctcgtgtcaaaataagataaaaatagtacaactaatgtaaggattacgaaagtgcttattttggctcaattcaacggcaaattttaatttgattttgcaggtttatactacaccatcatctatacatctttgtgtactaaaaaaccaaactaaatttcaggacaatttattgataaaagttctactatcattcttaaatttatactattata

SEQ ID NO: 50465 - DNA, 447 bp, Arabidopsis thaliana columbia
taaaatatcaccgctgggcatggtcttaggttcaacaaataggggtgaactcttgtattcaatttttttatttataaatttttgaaaactttttcgactcacctttagtgtgaaccaatcaaaatacaacaatatgtaatatcatacttgatttaaaaataaatcaaaattaaaatcagaaaacacataaggaaataaaatctgtatattttgaattgacaatggttaagtatcagtttgtgtttataaataagaatttgggtttagatttgagaattaactaaatttaaaaatcggtttgggtttataaaaacgtatttagagtttagatttacctattaaccaaaagtatatgttggtttgggtttataaaatagtatatagggtttagattttacaattaaacaaaatcatatgtcggtttaggtttataaaagagtggttagg

SEQ ID NO: 50466 - DNA, 446 bp, Arabidopsis thaliana
aatcttggttctttgaagaaacccttaaaacaatttctattgtgcgagttttgactctcacaatttggcgctagaaggaggacacttgagatttctcttagtcccggaacacagaaccaaccacccaatccataatggtcaacaatcaaatccccggtaacacagttgatgcagaggggaacccaatccctccaatccagacagacgttcctgaagtcgttgctcccgcaaccctagcagaactaagaagtatgatggctcaacttcagaagaaggtgaacgatcaagaacaggcaaattgatccttggcgcaacaactcgaagcagctacctcccaaggacagatcaggactactcgttttggcgcgaggcatcttcaggatcgacgagcagcagcagatctcaaccccacacggctcgtgttccacacgcctggcaatactaca

SEQ ID NO: 50467 - DNA, 567 bp, Arabidopsis thaliana columbia
ttttgggatttgtaaagaaaagaaagagattttgttagttattaaagaagggcaaaagcctcggttttaaaattttaaaaacaagaaccttagttgttaaagaaatccatatcagctagatgtatcaaagtgtagagaaagtctctcctagagtaaagagaaaagaagagactgattagaaaaagggcttaaaagatttgtgaatgcaaagggtagagttaggtttttatatcgggattggagatgagattaccattagaacttcatttgatatactctgggtagatgggatcttatctatgtatgcatagcttgagacttacctttagcatactactaaagcttaatcattttttgagagatccttgttactgaagcctcggtctaggacgacgctcatgtctcttgaccttttaccttagccaaatgagttcattgatgatgcattgattgattcacgttccaaaactaatgaatgttaaagggattggtagatttgaaacatgtgtaggtcgagcatatgagtcggattgattgttacaaggcatgggtaacgtgtttgagtag

SEQ ID NO: 50468 - DNA, 1264 bp, Arabidopsis thaliana
ctctttttacataataacaaaagtagtacaaaagtaaccgttactcaaaaaacacaaattagcatttagtacaaaagtctaagctcaagcggactcgttgaggatcttaccaacaacggggcgtgctttgcacatggctaccaacggtatagctttgggcattatgactcctcctccaccttcagtcatatccacctcttcttctcctatcctctcccactcaaaacattgaatcaaagacccgatagtcaagctcgctagccgttgagccagaccggacccaggacacgcccttcttcctagcccaaaccccaatagcttctgagcctccccttctttctcgaacctctctggtttgaagctcgttggatcatcccatatcttaggatccctatgtattgcccatgcattagtcaatagcatcgttccacgtggcatatggtaaccccctactttacagtcttctgatgctacgtgaggaaccaacaagggactcgcagggtataagcgcaacgactcggacacaatgttttgaagataaggaagatgtgagaggtctgattcctctacaagcctgttgaggccaaccttattatcgatttcatctctcgccttgcttagtatctgtggatggttcaacaaagctgacaatgtccattccaatgttactgcggatgtatcagtccccgctagtataagagacttcaacacaatggacgcatacacaaaaaaacaaacataactaattaatcccataccaaatgtgacaatagactaatgaacttaaaatgttactcacgagcatgattcctttgataatgttgtccgtgtagtactcgggttgggtttcttgcagacaaagcaagtgatcaaccattgtgttctgccttttctccttcccttctcgtctttcatcgaccaatccctgcaagaactcatcaagcctactagcgatcttctttatccgtttctcggaacctgtgatccaagtcaggatcggtaaataatcagcagtgtttccagcaccaaaacaacccattccctctgctataagctcccgcacgcgtttagcctccgggtcatcctctgcaccatctccgtagtaacattttccagccaacattcttataatgttgttgaatgttaagttagaaaacattgatttcatctcaacctttgtaaattcctgcaaaatttattgtatatcatatgttaaatatttgctacaattcactgaaattcacctataagcagagattgacta

SEQ ID NO: 50469 - DNA, 771 bp, Arabidopsis thaliana
tagagtagcggccgccagtgtgctctaaagtagtgtggagtgttgaagagtaccagatggccggtgagcgaggcctgaaccgcaatctgcgcggtttctgtatcacgaatttcccccaccatgacgacatccgggtcctggcgaagtatggcgcgcaggcgcgagcgaaagacatatccacacgggtattcacctgcgtttgcccaatgccttccagctcatattccacgggatcttctaccgtcagaatattgcggccgggagtattcagcgccgaaaggatggcgtagagcgtggtgcttttaccggagcctgtcggccctgtcaccaggataataccgtgcggaacgtgaatgagattttctaaatcctgcttatccgctgccgtcatccccaggttgttcaatgaaagctggaggctgtttttatccagcaggcggagtacggcgcgttcaccatagatggacggcagtgtggatacgcggacatctatgttacgtcgcccgatacgcaaactaattcttccatcctgtggaatacgtttttcggcgatatcaagacgagccatgaccttaattcgggagataagcagtgccgccagttttttgtttggctgtaaaattgtccgcaaaacgccgtcgatgcgaaaacggatcgacattgttttttcataggtttcaatgtggatatcagaggcggtttctttgatggctcactcaaaatcgcattgatcaagcggataaccggtgccgctgaatcttcattcaggag

SEQ ID NO: 50470 - DNA, 890 bp, Arabidopsis thaliana columbia
gacagagacagagaagacctagggtttgttttgtcgtgtgtctgggaattgtggtctctctttggcttgagcatgaagcatcttctccgacaacaattcagtaatttcttctggatccttccttgcagacgttccttcgttcatttccccaaaaccattccttcgccggagctcattaatgacactctcaagcgtcggatccagagagtccaagattcgtcagtctccatcactccgttgctccgagaatggtgccaacgcggaaatcaaacgggactttcaaaactcaggagcatcattacctctcttcacagatccaatcgcttctctcacgctctccaggttagagatttcaaaaacaagcaaaattgggacttgtacaaatttgttaatcttaggtttttttttttgtgctattaggtatcggattggatgattgaacaaaaagcctataagctgagttcaatggattttgagcgacgacttttcttggctgctaaagttggtggtgtggaagaagcggctaagttcttcgagactgttcctgtagaaaagagagatatttatttgtacaacgctctcttgagctgctgcaaaacacacagctctttgggcatagctgagactacttttcagaagatgagataacttggttttgctgataacaatcctcaattctatagcaccatgctctgtctctaccatcaggctgaagatcacgacatggtggtgaagcttcttggcgagatggacgagaaaaagatgcaaccccaaggactatgctttgtcaagctcttgacttcttactctatggcatctgttgtagatgtacaaggtgtggagaagtttttgagcaagtgggaggtgatgattcaggacaaatggaccac

SEQ ID NO: 50471 - DNA, 571 bp, Arabidopsis thaliana
tgaggagacacaaaatgaaaacatccctatatcatttcaacttcataaacacttacagtttaccactgctaaccaaagcgttgacaaagacatcattagagagcacatcaagtttcttttgctcttcaccctaataccacaaaaaatggaatctcagagacaccaaaataacaagaagaagaaacacacaaaacttgcctgaatgtttgtttcccctgcaagtccaattaacttagccaaaccagcctgcaacaaacaaccataaagattacaactttctcaatgggccatcctaaataacactaaagacgattgagacaactccacatatctagaaaaagagaatttccagatcatcattcatcaacaacccataaaaatcaaaccttttacccaacataaatcgaaagcgacatctttttttaaagcactgacccaaaaaatcatctaaagatcgaaactttttacgttattaacagcactgcaaacgaatttgcacccaaaacgatgtgactaagcaaaatggtgaaatcacacgagattctggatactttgattgtcattcacacga

SEQ ID NO: 50472 - DNA, 1041 bp, Arabidopsis thaliana
agtaaacccgtaaatgcaggactagtagtttgtggttgtgaagatgatgcaggtgttgatgtcttcggtacagcaaacccagtaaaagagttcgtagatccagtggcaggagtcgagctagccaaaccaaatcctgtagtactgaatgtagcagcggactagccggagtggtgttggttgcagatgaagtcacaccaaaagaagggaaagccattgtagaagcgggactgacagaagctggtgcactagtagcagccggagtcgaagaagaagtagtagtggtggttgcaatggaaaacactgctccggatgtgctagatgcaggtgctgcggacgttccggttgaaaggttaaaacctgaattggcggatgtaccaaatgagaaggaggacgaagatgaagccgtttgtggaggagcacaaggagtggtggagctggtggtcgaacttgcagtgcttttcaagaaagagaacccggtagaagcggagaatggagaagctgaggcattcgaggtattggatgtagatgaggaattgaaggtggatactccaaacggggatggtgaagaagttgttgcgcctgacgaggaagatgcaaagagagacggagttgaacaggctgaagaagacgaaccaaagaacggtgaagaaccggtagctccaaagattgacggtgaggagccagaggtcgatgaggcaacactgaaggaaggtgacgagccggtagctccaaagatggatgatgaggagccaggtgctgatgaggccacgctaaaggacggtgttgcgccggtggctgatgatggcgcgccgaaaagaggagatgttgaagtagcggcggatgaggatgctccgaagagagaagaattagaggcggaggcagatgaaggagcagagaataaggaaggggaagatccaaagagaggtgttgaaccactggctggagcagctccgaatggagatgacgatggagttgcggcggaagaagcgggactcctaatagagatgacgatggagttgcggtggaagaggccgaggaagt

SEQ ID NO: 50473 - DNA, 553 bp, Arabidopsis thaliana columbia
ttatatatcatctaaatccctaaagataaaccctcaacctagcaagagaactactcaagcatggagattgaagcaaacaacatgatttaataaaaaatcttaaaagaaaataacaagagaatagcgtttagaaagatcttctctaaccggagtttccacaaggtttttctcccaagaacaacagagaaaaggagattaacctctccaagcttaggtctaaaaatgaccttaaaaatctatatataagttctataaacgtgcatggacttctttgaaaatagggagaagttctggggcgaatctacaaatcttcaaaacttcgaagagactcgaaatttaattgccgtcagatattggtgtcgagcaacactaggggtggtgtcgatcgacacctatgcgaattttggtctccggatttcttctacagcataagttctatgttttcttctagaattctccataatctccaaatgcatcccaaagttctggggcgaatatgcaaatctttaaaacttcaaagagactcgaaatcgaattgccgtcagatattggt

SEQ ID NO: 50474 - DNA, 373 bp, Arabidopsis thaliana columbia
aatcaatgttatctccctgtattatgcatgtaacctcaggtctagggagaaggatgttggatttcttatctgtagagagctcaagcctgaaacgatgtctgtcgccaatcattgcgaactctaggatttcccagtgatgctagatgcgcgattctccattgtccgtggctcaagtccatcagatgtgattgggactccacaagctgattagactacggtgtcacacacacaccgtatgcatctagcgcctcgtgctctcttgtcgctaattgctaccagcggatctcttgtatcctatcaggtggataagaggcagtatagagaggtgcgtcatgggtctcaccatggagagacatcttggtcgtggtgtgtc

SEQ ID NO: 50475 - DNA, 367 bp, Arabidopsis thaliana columbia
cgccagtgagctgtagatgaatgaagtaaacaacataattagaatagaaatcagtgaataaaacatgaagaggatagattaagaaagatccaaagggagtttccacaaggtttgctcccaaagtacaaaagagatagagaatagcctctccaagcttaggtctaaacaatgaccttaaaaacataattatatgtctaaaacacgtgatgggccttcattaaacataggagaaagttctaggccgaatttggaaatcttcaaaacatcaataagttgagtcttgaaattgccgtcacgtattggtgtcgctcgacacctacgtgcatttttgtctccagatttcatcagcagcataaattccctgttt

SEQ ID NO: 50476 - DNA, 488 bp, Arabidopsis thaliana
atttatttattttattttaatttttgagagacaagagactcactctgtcgcccaggctggagtgcagtggtgcgatctcggctcactgcaacctctgcctcccgggttcaagtgattctcctgcctcagccttctgagtagctgggattacaaggcgtgcgctaccacgcccagctaatttttgtatttttagtagagactgggtttcaccatgttggtcaggctgctctcgaactcctgacttcatgatccgcctgcctcagcctcggcctcccaaagtgctgggattacaggcatgaggtactgcgcctatcaggccgaactgtacacttttagagggaattttatggcatgtaaattacatctcaatttaaaaaacaggaaggcttagggggactgatttgagtaataataaaactccagtttcctgcaaaacaaaaacaaaaagacaaggccggcgagctctctaagcactgactatgccagga

SEQ ID NO: 50477 - DNA, 511 bp, Arabidopsis thaliana columbia
gctctaaagatgagagtcagctatttggatcaacaagtgtggtgaaatgaataagaagatccaaatatttttagggtaaccatgagtttaacaagcaatgcatagtatgataattacaagtcaaattatggtttaaattgatagggaatagcttcaaatcacagcgagtttcgactaaggaaggtcaagtatatgaattcaaaagatggtgcggtcttacttcaagttcaatcggttaagaactagacaactaacaacaaaggcattaaaactatctagtgaacattgcaaatttacaaggctatgatcatcattatcccctatgcaagtgcatgatgcaacaacctatatgatatcattcaaaaaacagccctataattcaaatggaaactacatggcactctaatttttttggaattattttcaaaaaattttcaaatttttatgggttttctatgccttagatgatgcaaaaatttgaataagaaaacaagaaacaatgttagataca

SEQ ID NO: 50478 - DNA, 543 bp, Arabidopsis thaliana
caaagacaaaaaaattttgagtaatattattaatttgtttatcttttgattgaattttcaggcgttagagacgaaccgtttgtttatggtggactaccatgacatatacttaccgtttctagatagaatcaacgcgcttgatggacgcaaggcttacgcgactcgaaccatattgttcttgacccgactcggtacactcaagcctatcgccatcgagctaagcctcccttctcaatcaagctcaaaccaaaagtccaagcgcgtggtcacacctccagtagacgcaacctccaactggatgtggcagctagccaaggcccacgttgggtccaatgacgctggtgtccaccagcttgtgaatcattggttacgtactcatgcgtgtttggaaccgtttatattagctgctcatagacaattaagcgcaatgcatccgatattcaaattattagaccctcacatgaggtacactttggagatcacatgccgtggcacgacagactttgattagtgcggacggtgtgatcgagtctgagctgctag

SEQ ID NO: 50479 - DNA, 601 bp, Arabidopsis thaliana columbia
gtcacttcaactcaaaatcatagcaatgatctctcaactgtcctaaatgatgcctatgttcgcttaggagatgaccgagagtgttcttgagtaccaaattctcaagatatatatatgtctattaactaggaagctccaattgaattgaggaaagaaaatctaactggaaccacggcgaacactttcttcggttcgttcaagagcatttgttagcacgtctattgtccagtttttcaagtcatcctgattaaaaaggaaacaagcaaaaggtttggtcatcgagtgacgatatgatttggtaagatactgcaaggattggtgatttaatagagcggtttaccttgcgcacaggttctccagttcttatttgtgcatttgggcgagcaagctttgactcaaaaggtgttcttggccttacttctctaaactcatcccactcctcacgatcgatcattcgtaccgtgccttgcccctgtggtgcattctttatcttgcgttcaatcatttcttgcgatttcgaatcatcgatctaacaacaaaccaatactgagaatcagcaatttccacagatccttcctaattcaattgcacaaaaaagtat

SEQ ID NO: 50480 - DNA, 534 bp, Arabidopsis thaliana
ccatcactaccaccaccaccttcggccaccacctcttccaccaccacttccggtcactagtcctcctaaccacctccggtcaccaccacttcctgtcactattcctcttaaccacctccgaccaccaccacttctggccaccaccacctccgaccaccaccacctccggctagaatcacctctagccactacccccgatcacgatcaacacctccggccatcaccatctccggccatcaccatctccggccaccaccatctccagtcaccctaaaaaaaatcaatttggtcaatatactagcctttatggttaattactatattttgaaaactatagtgttagtttgttaattagtttagaaaaaattactcagatagcatagaattgtatgtttattcataaaatatcatatatctttttttatttatttatatgtttttagtacttgtgtaattacagttaacactcttgattagtaattattaaataatattattaattcgtttttaataaaaaaaacaaaaaaccattga

SEQ ID NO: 50481 - DNA, 538 bp, Arabidopsis thaliana
catcgaaaatagaagttaaaattagaaaaccgccccgaaagtgggtccacggttaaataagagttttgagatcgcccagaaaaattgggtccacgatcgatgtatcaaaataaattacaaagacgacctattcagatcgtctggttcgcctcttcaacgcttacgcgtcgaatatcacttccgctaacaaggtcgacatttgagccgtgctggtccgccaccggagcaacttgagaggtttgcctcgaaaaaccgagctgatccggggacatgttcaggtcatcattcccgagctcgatgacgttcaaagcattgacctcgtcggccgcccttctggttaactccttaaggccgctgagctcggatgccgcaatcttcgcgcctctctgcatcagaatacccactatctcctcagctcctttagcttgattctcagcgtccaccttcggcccgacgtaggtctcttgctccttgagataagccttcactttatcaagacgagcttgggctttctttgtggtacgggcgactttagtag

SEQ ID NO: 50482 - DNA, 907 bp, Arabidopsis thaliana
ctaaagttatatcagaaactgacagctctagctctcctgtttcaacaaaacctcaaggtatattgatgatttaccaaatcttttccttgtcaaagttttgtgtttgactgtgtgggtttgaacctgttaggattcagtatgatatcaagtatgtgtcttttggaatacaaggatttacccttatggctatctttgttatctgtgtgaccttttctactttctcgctttgtaagatcgtctgagaatcattggagggcatttgaatgttgcagctgaagcaaaagctcccaagagaagtaggccaccgatcacgactcatgtcttagacgtctcacgtggtgctccagctgcaggtgttgaagtgcacttagaagtgtggagtggtactaccggtccttcctttgttcatggaggtggtggggtctggtccagtgtgggcacatcagctactgatagagatgggcgcagtgggccactgatggatttggttgacgctttgaatccagggacatataggattagcttcgacactgcaaagtattccccaggctgcttctttccctatgtttccattgtatttcaggttacagaatcacagaaatgggagcatttccatgtcccactgttgcttgcacctttttctttctccacataccgtgggagctagagctatgctactgctgtctgcggcaccaactttccaacacattttgttttggttgtaccactacgggaacatgtatcaaaattgctatgaaatgaagtctttattcgacatgtataaaaattgctatgaaataatgtctattcgagtatttatttggatttgtagttctgtagacaaacaatgaattagcgaaaatacgagctttgatctagactcattgtgagtaggacacgatagtat

SEQ ID NO: 50483 - DNA, 453 bp, Arabidopsis thaliana
cactaagcttgactcttatagagcttagttagaaaaaaggtttaagagaggatcagagaagtcctcatctttagtggttgaatttttaatgcttgaatcatactttacatcctctcttgagatatggtaggatgagtactcatttgatttttcttcaaaataagcttccttctgatcagcagagtaatcttcttcttctgaaccaggttcctttgaccaatcctcaaattcaaaattggggtagcctttaaccatttcttgaagttccaagattgcatggttcagtccttccatcttgtaagttacctccccaatggtatcctcttgagctttgtatccaacccacagcaccaggacttcttcagcaacagaatcatgaatcaagtgttcttcttaagtagaggggttggtggttggtttaggtactcctggagaataagtcagaataggagt

SEQ ID NO: 50484 - DNA, 586 bp, Arabidopsis thaliana columbia
gtcagaggatcccctgattacatgtagactcttgtaaaaagtaatattgtcaactaaataaaactaaaagattgatagtagggtgtcaatctaattaggtaagtttcctataataacgatgcaatcatgtactaagtcaagccaagtctagatgatttgaattatctaacaacctaagtgatcatgcaagaaactaacaaaactatactaagcaggaattaaagaacatgagtgatgaaagtaagaagtaaactacagaccatgaactatcaatgcataaacttgaataataaactaagtagagaaaagaaaagatgctcggccgagcattgaacatgcaggtcgagcaaacacgttgagcaaattaagttgagtagatgaattaaacaaaacgagcaaatgaacaaaagaaaatgagcagatgagtaacaacacgaaattcaatcaatctaagcgacgcgagctcttaagagtggggtagttggttctagtggactcctaaatccatttagctaactaacaaactcaatcaagctattcctagacaatagattcataatcagatcaatacactctcgtgacaatg

SEQ ID NO: 50485 - DNA, 579 bp, Arabidopsis thaliana
acgaaatttggggccaagacaagcattatcgtgtaagtaatgaagttttaaagatttgttttgttataatacactatgatcttcattgtgttcgaaatcaattttgttttttataaaaaaatccagaatttttttatttctaattttgttggttgaaaatggtaaatgtatagatatttatgtttataagtgtgtataacgaaattctatttgtttttgtcgatataatcatattttcagttgcatttattgggtttctcctgaatttatgatacagttgggtaatgtataatctcgtatttactatggtcggtgagtggagatgcaaagaagaaaaatggaaatttgaaccagaggaagacatgtttggtcgttgtgtacgtgttaaggaaaacatgacgtacacggaatttgtatgtacactaagcgagactttcagtttgaagtccatagagatcaatcccatgattagttactggataccgggagtgatgttagttatgtagatactaaacgccctcctgtctacattgacagtcaagtgagggtgggatacgattttttttattcgtggtgggt

SEQ ID NO: 50486 - DNA, 1163 bp, Arabidopsis thaliana
tcgggcaacgttcccaacattcttagcactgattatcagtggcagcgggatttcagattcttcagacatctcttcacaagcatcttcgtctgctaagccaggttcgtagttccacttgaaagggttatacacattggttgtatcaaaagtataatcatcattagccatagtttgctgcacctttgatttgtctttggcctcacctacatagatacatataaaagaaccagcacgaatagcatcccatgaccgcaatccccatcctctattcgctgtcttgaaaacttccagcctcacttttactcccatttgagtcaccttgtttttgcaagtcgagcacgggcaagatggactgcattcatatatcataggctttcggctaactagaattccattaccggtgtaggggaagtcacctccatttttccttatgcagtgacaatccaagttccctggtttgcataagttggcacaatcacatccaaaagaaggctgcatcagcttaaacgactctgagtatttcacagttgtggagtaggtgaaataagcaggcccattgtcggtatcaacttcgttaacaagtgaaacaggtatgctttcaaccccggaagtcatatcgggaagaatgagtccttgccttgaaggcacacccgtcttccatttctggattgcagtccatgaagcaaatgcaggcggttgaccaggagctctaactagtttatacttgaaggtgttgtgtccagattttcctttctctacccatgactctttaatctcatagagtccatcataaatatagatcttagcattatgagaagcctctttcaagccccttattaccctaactgcactatctctacgcaagctcttctccaaggcaagattacccctttcgagcttttggtcagaagattgcttatctttatcagcattaccaccctgaccagtataaatcaaaacatcaggattaccttcgtcattatcataatatccagatgagacaatgctagtggcgataggttcttcttccgtttctcccttgacaaccagatagtcaatcccagccattgatggagaatgaaccccaccaaacacatctcaaacctgaagaagaatacgtccccaatctcaacaccaggaacaataccaggtctttttttggt

SEQ ID NO: 50487 - DNA, 1053 bp, Arabidopsis thaliana
ggtaaaaatttcaagatccattgggttagaacttagaagtgatatacctgaaggagatggacatcccgtgacataaatgcatcttcttgagcaagagaatgaccttccagtctaacaacttctagcatctaaacataacaaaaccaaatatatatgtaagagagagacataaaaatgatgttttgtcggcaggtaaagactttgaagccttacttcttcgtgttcaattgtatgtcctagtggcattatgatctgactcccagtgaatcttgttggtctcattcccggataagcaaagctaccagctttaagtgtagcagcggaatatgcatcaacattgaaatcagcccactcagatcgatgctctctaaggaaccggatcaaaaccgcaggaggaacattctacagaagacaatagataacacaaatttcagccatagaaaactgtcaaaagaacacaaagtaccaatactggacacactaacttacttggagaagcattgaagccttggcacagagcacgcctccaaggaacgaaagagaattagaaatattattcaaatgctttgtagagttaatagcaacgataatatcttccgctccatcacaatgcatcgtagaccacccgtcgtcaccaaacccattaaccgcatcattgaagccccttcaagaaaaccaagaacagaaaaaatgacaatgagcaaacagagcaaagaacaattaggttttagctcaagatcgaagtacctgcttaatctttggctaaaggttctaagaacagcaggctgccttcctaatccatacactacttcaccattagactcttgggctaattgcctgatataccgcaacgcctaaaacatgaagcacctccaaccgttagatatgttatatgaatcaatcaaagcttaaggttattatatgtatacactcacggaaatggtcattttttgtgcaacgactttggatgactcataaaggggtcgaagcacatccggaacactccaagcctacaatgcaagaacaaatgtgtataatcaattcttctagaaa

SEQ ID NO: 50488 - DNA, 805 bp, Arabidopsis thaliana
tgcatttttccgctctgctgctttaatagtaagtctaaagctcctcaacaagtttcaattactcccgagtatttttactaatttctcttctcttttgcagttgatgactcttcttctattgcgacatgcactgactataccagattattcagatagtgaagatgatgatccttcttcaatactttctgtaagttactacttcttccttttttccagcatatactggaaaagtttcgtataagttctaactccaaaccacaaaatcatcttgcagcttttcttactccgagctgccagttttcttcttccttgctacatcatggcatcagccatcagtatcctgcatcgccgtagacagagacaggaagcagcggacttggccactcggtttgcgttggtgctcagctcgcgccaacctagacccgtgattaattatttgtcaatggagccatgattttatagttccactctaagagtttcaggtgtatatgcttttcaaatatttcatcagaaaaaagattcatgaactgctgttaaaagagtggtttacagtaagtagaaagaagaatctcttcttcttcttctcacttcttgcaaagctattgaaactatcttttctgatgaaatcattgaatcatatgtggtgttaatcaagatttggtagcaacaagaaccatcacaagatctacatgatggtccttctgaatcagctttcttacaaacaaggagtgtcctaacttagtgcagagtttttttttttacaagtattcgattctaagaaagattgtgtatgtagattaaagag

SEQ ID NO: 50489 - DNA, 859 bp, Arabidopsis thaliana
acggtcaattcaaaatattcatctctctctctctctccacatggacaagacatgattaagaaagtatataaaagaaacagagcagagaaagacattttgttccggtataccattgcaatttgcaaactgcttcaatccaatttccctaaacctcttagaaaattctgcaaaacccaccaaacaaagaacaccaagaaagacaaaaggcaggcaagactacaaagcaaaaccttcttcttcttcttcttctcgttactcaaatcatttccatatatacgcaaaaaccattaagacaagctagaaacaaagaaacatggttttctctgtttctatatttgcctctcttgcaccatacttaatctcagcatttcttcttttccttctcgtcgagcaactctcttaccttttcaagaaacgaaacatccctggccctttcttcgtccctccaatcatcggaaacgccgttgcactcgttcgtgaccccacttccttctgggacaagcaatcctccacggcgaacatctcaggcctctccgccaactacctcatcggaaaattcatcgtctatatcagagacactgagctttcccatcaaatcttctcaaacgttcgtcccgatgccttccaccttatcggacatccctttggtaagaagctcttcggtgaccacaaccttatatacatgttcggcgaggatcacaaatccgttcgccgtcagctagcacctaacttcactcccaaggcactgtccacttactctgccctccagcaattagttattctccgtcatctacggcagtgggaggggagtacctccggcggatctcgtccagtgtcactgcgactgtcatccagacta

SEQ ID NO: 50490 - DNA, 524 bp, Arabidopsis thaliana
catcgagtgatagtgaattcggaaaaagaaagggtttcactagcattcttctataaccctaagagtgacattccgatccaaccaatgcaacaacttgtcacctctacgatgcctcccttgtatcctcccatgacctttgatcaatatagactcttcattagaacgcaaggtccacgtggaaaatcccacgttgagtctcatatatctcctcgttaattgatatctacttcataaaatgtctgataaatagaataattgtaagccttcttgtttatatatgcagctcaattactagtgagtgcatctatatacattaatctcttttatgtgctatatactgaaggataccgaagctatggaagcttaaagaactacctagagattccaaaagattggtgaagaatgaagatatatatacatatatattgagatcaaagtgaatcgactaaagaccgagaactatcaaacatttgtttaagttaaattactttgtagtcacccttgtagtgaattatatatgttta

SEQ ID NO: 50491 - DNA, 620 bp, Arabidopsis thaliana columbia
caaccatgcgaacaatttcctggatcttatgcatagcgaggacagggagagcaagcgaggactcgtggatgcggtggttgactttctacataagtccgggcaaaaagaagaggccggatctgtctgggaagttgctgcacaaaagaatgtgtttcctgatgcattaagggagaaaagctgcagctactggcttatcaatctccatgtaatgtcagagggaactgcagtcaccgcgctgtctaggacgcttgcttggttccgtaagcagatgttagcttcaggaacttgcccttctcggattgatatagtaactggttggggaagacgtagtagagtcaccggtacatcaatggtgagacaagcagttgaggagctgctgaacatctttggttcaccgtttttcacggagagtggaaactcaggttgtttcgttggaagcggagagcctcttaacagatggttgctgcagtctcatgttgagaggatgcatttgctgtgagtttttgtatccaatataggctttttatatttatttattttatcttttggccgattgtgtcttatgaaattgttttagctagtaagtcataagttaaggttagagctagacaggatggagt

SEQ ID NO: 50492 - DNA, 1359 bp, Arabidopsis thaliana
gtggctcctacaactcaaggctcctttagatttttctccaattttccttttccattgacatcattgtagaaccagccgtctatgtagtacatggctggtaagaaaacatttttgtaacatttgatgatgtacaaaaataaaatataaaaaatattccaaatgtaataaattagggtcgtatcaccctcaaagattgaattatataatgttgacatgagaacaaaaatctggagacaaattccagtcatcaataaccttaaacttatgacctacaaaaccaaaccattgagattccgccaaaagatcaaaaaaaataagaggccttaaaagaagaaaacaaaacaactaatctacaactaaagcaaatgcatcctctcaacatatgattcaagcaaccaattcttgagaggctctccgcttcctacaaaacagcctgagttcccgttctcagtgaaaaacgggaagttgaatatgttgagcaattcctcaactgcttgtctaaccatcgacgtgcctgtgactctacttcgtcttccccaaccagttactatatcaatccgtgaaggacagtctcctgaaaccaacatctgcttacggaaccatgcaagtgtcctggaaagtgcgatgactgcagttccttccgacattacatggagatttataagccaatagctgtagcttttctccctcaatgcatctggatacacattcttacctgcagccacttcccataccgagccagcctcttcttttagacctgacttgtggagaaaatccactactgcgtccatgagtcctcgcttgctctctctgtcctcactgtgcataaaatcaaggaagttgctgacatgatcacgcactttttggccatcaggacctgcaggtggcattttgagcagaaacatgtgagccggatgacctgagactgccattagctggccacaaaagcccatgtcaaagtttgaacgagcatctgtgcaacaactcaatagcaatgtgtatgtctgcaaagaaggatgtagaccaagcgccacgatgctttgtaataagttataggcttcagacatcctgtggaccctaaggaaagtgctgagaagggaattgcaggtgggaacattaggtcgcagaccggcttgaagcattgcttgataccactgccaagctttatctacattgccagcttttccccacaagtccaccaaaagaccgtaaaccggttcatcaggaacccagttcttacgttgcatctcagcgaaaacaccctctgcttcctcgagaaatccacagtgtccaagtacctccataacaatactgtaggtcctttgtcaggttgaacccggcattttcatgtctctgtag

SEQ ID NO: 50493 - DNA, 801 bp, Arabidopsis thaliana
cagatggctcatgatctgtggaatgatggtgctgggtgggatcttcagcgcatctctccgtatgttacaaaagtgaagcggctggagttagcgtccatagtgctggatagggtcactggggcaaaggatagagtttcttgaagcggtaatgctgatgggcggttttcagttaagtcagcctatgctttactaacacaagatgactcgccaagacaggatatacgaactttcttcatgagagtgtggagagtggttgtgcctgaaagagtaagggtatttctctggttggatgcaaatcaggtgatcatgaccaatgaggagaggaggagaagacacctttgtgacttggatatttgttaggtttgtaagggaggtacataatctgttctacatgtgcttcgtgactgcccagcaatggcaagaatttgggctcgcattatgccaataaggtgaagacatgctttttcacgtagtccttgtatgaatggctctatgagaatttatgtgaaggagtcagaactaaggatgcagtctgggcaacggtttttgcagtggctgtttggtggggatggaaatagcgctgcgggaatgtgtttggtgagcaacataaatgtcgagatagggtccgttttttaaaggagctggctgtggaggttagtgtggcgaatgagacgaaatcagatggaggtatcagggagaatcgagtcgaccagcagatcgggtggcgggtacctagtgctggttggtataagctcaatatggatggtcctctagagggaaccgggtttagctgctccggtg

SEQ ID NO: 50494 - DNA, 485 bp, Arabidopsis thaliana
taatgatacctgcaagatttgaagcctaagttccgggctcatgcaagccacacccacatgtctcttttccttacaaagtgtacagaaactgaagtagcatttgaagcataaagcaagctgttcctcgtcctctatgcaaggggtttcacatctaggacagtaagcaacgtcagtcatggattccagtgttttctgtaacataagagtttcccaccgttcatacgcttcatcgcccaacaatctcttcaatatccctggcggaacagtttctccacatttcgagtccggacacttgagcttgttaactgtgccttcagtgacatgtatgtctgtataggtcttcatacatttcaaacaaaagaaatgctggcatggtaacttaacaaagtcgatacctgtagagggtgtaaaacaactgtaaaccaacccacattactaaagaaaacagctatgaagaagaacaagatatacctgcagattcagag

SEQ ID NO: 50495 - DNA, 545 bp, Arabidopsis thaliana columbia
ccgagagatcttatacctagacatgcattctaaacgagtttaattgttcaccttagtagataggctgattcttattacacagctataaaccaggctcatcaaataatagatccaactataaatacctatggcggttatatctattgtttggattcaagttctagtttattactctagaactagcattaagaacaattaaatatgaagaattctacagataacctagcaggggggcgatctactaaaccatatgaatccctaatgagaaaccctaaacctaacaagtggattgctcatacatgatcaaagaaacacaaatcatagtctgaattggaaataaatagtcaatatatcaagagaaagagtaagaaagatcttatctaaaggaagtctccacagggttttgctcccaagaccaaagagataaggagaatagcctctccaacttagatctaaacaatgacctaaaaactttacatatgacttaaaaacgtgataggccttctttagaaataagggaaagttatgagccgaatttagaaatt

SEQ ID NO: 50496 - DNA, 542 bp, Arabidopsis thaliana
ggcttgcatgagcccggaacttaggcttcaaatcttgcaggtatcattattgtgcctttgatcttctctttgttaaaccgttgactctttcttacatgtaaatctctatacaggagcgtcaagattcttctcgtcttggagaggaacaaaggcggaaagagaaagaaatgatcaatgagattatgagtgtgaaggtgataatgaaaagcgctaaacaatgtccgtcgtgcaaaatagccatctcaagaaccggaggttgtaacaaaatggtatgcaataactgtggtcaatacttttgttaccgttgcaacgaagctatcactggttatgaacatttcaggttagtgatgttacatatatacaagaacagatacatatgtatataaatcttggaactaagtaagctccgtgttttctttgggagaaagtgagggaaaatgtgaactgttcccacaagaggcgatccatgaatggaatgagatgatgaatgagagacaagtcattggacagattcaagcgcgactgtttgcacaaggcggtca

SEQ ID NO: 50497 - DNA, 564 bp, Arabidopsis thaliana columbia
gggtcaactcaactcaactcaatccatgaaccctaatgagttgaaaattttgactcaaatgagttgatgggtcaaatgagttatagggtcaattggtttgatgagtaaaatgatttgggttgtaatggttaattgtttcaatggtttacccaattaacgcatcaggttttgtaaaattgaattaaaccaaccaaaatctctaaaccaatactaatttaagtttaaccaacacatctaaaccaatttaataaaatcaatatttccaaatttcttaaatatacaagcgatgaaattgagaaaaagtaaacccgtgatttcccaccaaaaaacataaacccgtgattttcccgccaaaaacataaacccgtgattttccagccaaaaacgaaaactcatgattttctcaacaaaaaacataaactcgtgatttcccgccaaaaacgtaaatccgtgaattttccgcataaaacgaaaacccgtgattgcccgccaaaaacgtaagtccgtaatttcccgccaaaaacgtaaatccgtaatttcccgccaaaaaatgtaaacctgtga

SEQ ID NO: 50498 - DNA, 578 bp, Arabidopsis thaliana
ggagaaacagcaacggaggaatgagacatgcggaagaaaccctaaccctaggagtaatttggattcgattcgtggtgatgggtctaggtctgattctgtttctgaaagtgttgtctttggtaaagacaaggatttgatttctgaaatcaataaagatccaacctttggccaaaatttcttcgaccttgaagaagaacacactcaaaggtatcatctttcttcatcaatttcaacctaattttttgggggatttcttatttttatgaatctgtgtgaatttgttctgtttcttgagaaaactttggtattggatttgaaaatttccgttgttaatttgaaaaaaggatcaattttttgtcttgtatttggttaaaattgaaactggcgttttcgattttgaaatttaatgatatttttaccatgtgtatgatatgatgccatcttttctttatctgacaacaccagactcttctctctgtttctgggaaagaaaatatatataattaatcaaaaatgtgtttcttttttcttgagaaagtttttaattttcttcaattactttgaagaaggtgatagtg

SEQ ID NO: 50499 - DNA, 585 bp, Arabidopsis thaliana columbia
gaggatcccatcatcgcagttgtaatcatccatggaggattcgccaatatagttactgatattgatttcctgaaaaagaatgtaactcaaagccaaacgttaatatgttagtccaaataaatgcaaacactaaaccggtcaagtacacggtcgagtattacggtcgagtacagtgaaattgtggcttcgggtatagcggtcgagtgaagatgaatgagagacggtaactgcgtggtcgagtaaacggcgaatggagagaagacggtggcggtttgaggagcggtcgagtgaagcttcacggcaagtgaacagcttgaggtcgagtgaagagatgaacggaggcgcagtgaatggcgaggtcgagtgaacggcgagaagcttcggcgaagtcgagttggctcgcgagaacgagagagagaaactctggccgtttgtcaaaaatcgaatgaagagcctctttatccaaattgcagggcggtctagtgaatggtggatagttgagagatgttgaaccggtccgcgtgtcgagtgaaagagaggggcgaagatgtggtcgaatagcggttgagtatggagaggtgagag

SEQ ID NO: 50500 - DNA, 529 bp, Arabidopsis thaliana
tagtagaacatacatgatagaacatacatgatacatgatagataactaataaatatgttatcactaaccttagttgtaccgagtttgtcatacacatctgacattggaaaccctttcatagtgcttgatttaaacttcattttacacatccggggacactgaggatctgcggattcaatatcttcgcagaaatttttcctgagaactggaatcgcctcgaatgctaaatactacaaaaaaaaatacaagattattcaaaactaagttgtataactgctaataaaaacaaagttgtacacagtttactttcttaaaacaattaatagatgcataatgaaatgacaaacctacaaaggcataacaaaactaggaaacaacttttgtggaccaactactccattgcactttttcatcaaatagaaaatgtctctcacattttcttcaaatgcattttttcccacggaaatgttttgcacaactctagatcagcacaaccctaaggaagaactctccaaatttggtgcatgtt

SEQ ID NO: 50501 - DNA, 442 bp, Arabidopsis thaliana
cagaaactcattcccaattccaacaaggttaatcaatctttgttcgaatcagagatagtgagaaacattgttctgattgatccgttatcttttgtttgtttatagactgataaagcctcaatgcttgatgaagctatagaatatctgaagcagcttcaacttcaagtccaggtttttttcctacttactatgattatatacgttcaaagtctgatttgtaaattacatcactcagatcattaacttgatttactgcatgatgcagactttagccgttatgaatggtttaggcttaaaccctatgcgattaccacaggttccacctccaactcatacaaggatcaatgagaccttagagcaagacctgaacctagagactcttctcgctgctcctcactcgctggaaccagctaaaacaagtcaaggaatgtgcttttccaca

SEQ ID NO: 50502 - DNA, 512 bp, Arabidopsis thaliana columbia
ctgcgttgtgataatttgaccttactgcaatttaggtgatatgcatgatcacacaaatttgacatttcagatatttaaatttgttgaaagtggttgtgcaaagtcaagtataaatatacttatcatcctgctgagcttgctttctatcacaaaatgcaaaaaaaaagtcaaacaaatcgggggcattccgagaatcgaactcgggacccctcgcacccgaagcgagaatcataccactagaccaaatgccctggtgctgaatacttgagttatagatgctataaagaaaaacatatcaagacattgtcagatctagctcctgtagttgacttttctgtgatgaattttttagtcttaatggaattccctagatctgatctgtgggatctgtttcacaactgagaatccagggaatgaccattggaaaatgaatttgtggtcacaattttagtggctggaaatactctgatggtatattggttagattgttgaagttgtttggtaaggcttga

SEQ ID NO: 50503 - DNA, 584 bp, Arabidopsis thaliana columbia
agaggatcccattatatagaatgcactgcacgttaaaatttgctgcggtggattaaatgaactcagccgtaacgcgatacagcggcagttacgcctgagttatggtatattgcggctgagttacgacaaaaatatatgagtcataacaaaacggcgaagtatgagtagaactcagccagacgttacggctgagttgtaatataacccaggcaacggtatggttgagttaaagaatgttggtcgagttattaaaagttatacgataacccagacaacgttatggctgagttatgataaaacggctgacttatttccgcgacacggcccagttatatttttggacggcttagttatggaatgatgtgacggctaagttatggtcgagtgttataaatcagccgctaatagctggattacggtataactcagccttgttatggctgacttatttgcaaaagattaattactataatagcatgtagttacagccgagttgttaaacgttacggctgagttagtttagttacgccataccacgactggacttacctttgttttccctggtttaattactgtaatagtat

SEQ ID NO: 50504 - DNA, 729 bp, Arabidopsis thaliana columbia
taggatcagacaagttgagaaaagcaaggacttacccactgtctctggcacaccccgagtgagaatgttcacagcttctttctgtaacaaaactgactctctctttcttttggcgttttggcttgcctcagacaagtcagaactacccacgggttgctgttggtctgacgtaacggcaccatcactactcgatatcattttacttggggcaatgagacttgtatcttgatatttaactctcttctttgataggagctcctcagagataatctcgccagctaccgtcgtacttaatctctcccttctctgtaccttcttttttcgtaagcccagggccagcttgaaaaacttgaattccaccttcagagttttcgttttaggcttgcgagtctttttcggtgtggtgagagtctccctctcggaagttaacttcaatgactcaattgaagtggccgattcttccaagtgatgtcccatagtttgatcaataagaacagctttttcaacaggtggattaccaactgacacatttataacctgtagcagtagcgagaagcaagttagaaacactcaacccttttaatgaaaatacagactcgttatgatatgtttatatacacttaccttcagtgaattagcaggctcattcaaattgttaagagaattcttctcttcaacactagtttcagctttaggtccaagggtaggcaacttcacaagagtctgagc

SEQ ID NO: 50505 - DNA, 517 bp, Arabidopsis thaliana columbia
tgatttatgttttatattgcttgcatgttgattgttgaggaactcactgagtgtattagggaaaccctagctatttaggttagaacccttttagtcttttagtggttaccagagttgtctcttagtccttagaattggaggatgaattcttttaaaggtaggagaatgtaatacccctgcccaggactaggactaagccgaggaattgtagtcgacgatttagcaagccgtacaatcggaacgatcgaaagaagtctttacgggacaagtattgtttcgtcaaaccaacggtctggcagtttaggagatagtcatgagcaagtggtcagagaaccggatgggtgagtcaagaggaacaaggattgggtgactatgtgatatggttcaaattacctataactactctctcaaataagagatcaattgcagttttttaggatcgaattcacggagttcttttgttcaaacagtgagttaaatgtcgagattaagctagcaggatatgattgaaaataaa

SEQ ID NO: 50506 - DNA, 580 bp, Arabidopsis thaliana
tgccttattttataattcttgacaactcagctgtaacattgttacatatcttgagtgtaactcagccgtaacaatatattttgccgtaaaactcagccgtaacctaaaacttttccgccaaacggtcagacacgaacctttcgtattcctttacctctcttgttcttttcttctatatctctgttacttcatctcatcatttacacgtctcatcctctcttcctaacgacatagttgttcctcacattgacggacaatttataagagatgtcgaagccgtactcaccgctcctgatcgggcgaatctccaagttctaaaccctggcttgggtaaatgggttgacaaaaccactgttacgtggttcagattcaatcgtgaactatctgtcgcgattgcagatatactttagcgcaactttcaccatgcgtggccgacgtaccagatgattcccgttgttttctaggaaagatggttttttgtcctcacggtaagcattgagtttttattgaaagcacttccagtaaaccatagaacaaattcttactatttgctctcttcgtagcgtaaatccacctagga

SEQ ID NO: 50507 - DNA, 536 bp, Arabidopsis thaliana
ccgagagaaaaataaataaaattgactgataggaattcagtttgttagcaatataagcaccttaaatcatataatcgttgtacctgtacacgtcagtctcccgaaccacgataagcgtcgtcctggtgagagtatatcacgaatgacagaaatcgatttattacgttagtaaaacattgatagacgctgtaactcgttatccagcaatagtgaaactgtcactgtccgtagtcttttgagcgtataactgagacaatattttcaatcacatccaatcgtagtgatgacgtctcaaccaatcagaaccattctgcacagtccaactcaatcgagtcgacttgcaaaatgggcaatagaactaagtgagtacgatatagaatatcgcaacagaaccagcttgaaagcataggtcctagccgactttgtaatcgagctcccgttagcggaccaggatggaaccaactccaataagaaatggctcctccacgtcgatggctcctccaaccgacagggatccggagtaggaatacaactca

SEQ ID NO: 50508 - DNA, 513 bp, Arabidopsis thaliana columbia
actcttgtgaaccctttaataatttttgaaccattttaaaattcttgtgaacctttacgaaaggttttaaaaagatttacaagagttttaaaggatcttcttgtaaattctttaaaaatcttttaaaaactcttggaaatcttttaaaacctttttaaaccctttaaaaatcttttaaaaacccttgtaaatcttttaaagctcttgtaaatctttgaaagccctttaaaaatcttttgtaaatcttttaaaacctttaaaaatcccttgtaaagtttttaaaaccctttaaaaatctcttgtaaatcttgtaaaaccctttaaaaatcccttgtaaatcttttaaaaccctttaaaattcttttaaaatccattgtaaacctttgtaaaaaataggtaaatactgtaaaacacctatttacccgtttgtcaatcatttaaatctccctctcaatagtttaacaagatttacaagagttttttaagagttttaaaaggatttacaaggatttt

SEQ ID NO: 50509 - DNA, 1113 bp, Arabidopsis thaliana
ggcttcgatttgtatggcttaaatcatgagtgtttatttcatcttttctagctaaaattaattatttattttgtctttcttgtttactaaatcatcattctaatattgcgggtttagaatatacaacaataaatttacaaaattaagatcttttaggatatttatatacattattgtatcagtcctttttaatactttttataggggttttttttctttgttcaaaatactttttctaggttaacattgttaatatgagaacaaaatgggccttgcgataaacaaaattgtggcttacgataagaactaattgggctttacgataagaaaacattgggccttatgattagaaaaatgggccttaagagttaccgagattctttaatacttttttcgtcccgagaagaaacggcggttgtcttggtcgtcgacggcggatggagtgtgccgcgcgtggttttgcgacgcggtgtgttggtccaccgacgcggaggtgtggtcagtgtggtgctgtagcttattgctccgtctctcatcaggttttaacttctgctttaactctctcttaagccttcttcttcttcacagtgatgatttgatcggtcgcttgtagttaggtggataagcaaattaggatgttccttgttgaatttgttgatctttattttgtttgtagatttcgcattggagctatcacaaggaagaatgtgagagattagaagagcaaatgcgtcgtgttgatcttttaaatgattttccatttacatttacagaagaagctacaattcaggttaatcatcactttgaatgatagtgaggaatcaaatgccttttggttagtaaaaattcagctcaaagtttaagtttttggtttattcgttctttaggttagtcaaaaacatgagactaggtgctcgttcttcatcaagaggggattacatcgtgttggaatgtggatgtatgagtgtaactgtggagctttggcttttgataggtttcattgcttattttttctctttacttaatgagaatcacgttttggtttgaagctattgttggttgagctgactactatctttttctgacagttttaatattgaagggtggcatttg

SEQ ID NO: 50510 - DNA, 667 bp, Arabidopsis thaliana
ctgaaatttttgaaagaagaggaagaacgaaaggagagacgaagaaaaggaagttccacttgtccaataaataagatctaaaaccaaacaacagaaaaaatgtaaagatatacggaaaccagataaaattgtttaattagttatattttctacaattatctaagtaagtataatgcatataattgttaactactttaatattttgaatgaccgaataataattttatttgaataaaagtatgttagtcgataaaattaacatgtattatcttcaaagttttgcgataatatacaaaaggctaaaaaatttataaaattattaacataccctaaagtgttattctataatttgatcttattaaaattaataacataaatttagatttccgcaaattttgaaaccaaaccatgatcggtatagtgttacaaaaaaaaccgtaatcggtagtgtccattcctataaatatgtacacatacatcacagttttaaatacccggagagaaatctttaagatcgcctcttaaatttctaaatcccaaagacagtaaaaatatcgaaattgggattaaaccggatcgtaccgaacattaaaccctaaacctgctctcttctccctctaccaatcaccaccaaaccattgaaacggagctctacaaatcggacacg

SEQ ID NO: 50511 - DNA, 331 bp, Arabidopsis thaliana columbia
ctgttgtagtagtgagagatgatatgtaataaaataaaaagaagcatatgatacagtaaaaaaaaatattgtttttatggccgtaaaccaccatgtgtaaagttgttgttgcctgctgttgtagccctttaacatcaattgcgtttatttcactgtctcgtagtccgtcctgtgaatctgctgttgcgccttggccaacgctttggccacttccgcttgtgacgtggtccgggttctgtgcgtcaccgtgtttctatttctgatgggttagtcgtgcaccgggtttttgccctgggttgtgtttccccggtatacctgcagctagcggtcc

SEQ ID NO: 50512 - DNA, 527 bp, Arabidopsis thaliana
tgacctactgaatagtatgcaggcggaggtggtggtggatgttggtgaagacgtaggggcttgagatgtagaacatattgcaggaatcgccaaagctgaagcatagacagacttccaaggtggagatggtgggggaggcaatacagttccactgtttggtctctcagatgaaaaaggaagaggtggtggtggtggtggaggcaacacagttccactgtttggtctctcagatgaaaaaggaggaggaggcggtggtggtggaggcaacacagttccactgtttggtctctcagatgaaaaaggaggaggaggcggaggtggtggtgggagctgagatgtctgatagtggctgtaagttggcaatggtagtgggggcggaggaggaggaggtgatgcaactgcttgtgaagagtgtaaaactgttttggcctcactggttaaagaaggcaggggtggaggagcctgatgtggagaggcaggaggtagagaagaaggcgtttcttcgggctagaatctggtgatgacaa

SEQ ID NO: 50513 - DNA, 867 bp, Arabidopsis thaliana
aacacaagaaatggccaaattcaaaacaatcctcaaaaccagtttgtaaggataaagaataaagtttagaacaatttttacattttttcaaagggtcaaatgcatgagatgtttgtcgtggaaatagaaatcatttgtcagatccacaaggaccagatccaaacaagtaacccaaagaagatcctccacctggtgcagcatgaaccttcgtagatggtcgttcctgtttctcaaaccacaaaaccaaatcagttttaaattcaagttcctcaatcaaacttgaatttaaaactcttaccgtgaggaagttgccacagttttgtccatctgatctgtagtaattattaggacttcctctcacaccagccgagttctcctctgtcttgtttttatctccggttgttgtagttgtggtcgtggtcttgggtctacctccagctccatccgttgttgttgtggtggtcgtggtggtggtaaaaccggttttagcgttgggcttgtttggtttgggaacagactcgccggaaccaaaaagataaccgagagagctctctccgccgccgctgttaactcctctagctttccccattttccggcgagaatattccgccgccgattcttgaaattctaacaatgtgtaacattgtaaacataatccagatcaatatatctataattaatttgattacttgtaaaccattaaagacacataggagagagtttttttttttgtaccttttttttcctgatttgtttcttcttctacgattggccgcaagtaaaggtaaagaaacagaggaacaaggagatacacacatgaatgtgtatatatacaatctacacgtgtaagatagtgtgtggtgagaa

SEQ ID NO: 50514 - DNA, 905 bp, Arabidopsis thaliana
tgtcacaacggtctaatagtggttcccaaatcttcaatgagattgttgttcaaatattggcttgatagtgaatgactaagattagttggtttagttatttgtatcagagtagtgactattgttcccacacacaaaaattattcttagtatttggtagctgtagctgttgtaatttgaagtccacttgataacttccttgtatttgtaggcgaagtatttagaagctttagcctctgagacacttctcacaagcgatgaagcagtagttgtagcagcagcagctgaagcagtcgcccttgcaagagctgctgtcaaagttgccaaagatgcaacattatttaagaacagtaacaacacgaacctattaacttcgtcaacggccgacaaacgctccaagtgggaccagtttactgagaaggaacgtgctggcatattggggcatctagcggtttcggacaatggaattgtgagtgataaaatcactgcatctgcctctaacaaagagtctattggtgatttagaatcagaaaaacaagaagaagttgagcttctggaggagcaaccttcagtgagtttagctgtgagatctacacgtcaaactgaaaggaaagctcggagggcaaaagggttagagaaaactgcatcaggtattccgtctgtgaagactggttcgagccctaaaaagaaacgtcttgttgcgcaggaagttgatcataatgatcctttgcgttatctaagaatgacaacaagcagttccaagcttctcactgtcagagaagaacatgagctgtcggcaggaatacaggtttgtcaccaatattccaaattctaaactaaccacctccctttttctacatcgcgtctgagacatcacaaacactcacccttcgtaggactctagattc

SEQ ID NO: 50515 - DNA, 675 bp, Arabidopsis thaliana
aaacggatatattagaaatttggagccaattcgaacaaataccaagggatttttaaatatagccaaatattattggtaaaataaaaagctcaacaagataaaggaacaaattaaaagaacaaaatcagaagattcaagagaaaaaaatcataaaaacaaattattgcaatcacgtttccttttaatgaaacaattcaaaatcaatagtaaggcgccttgtagacatatgggggtggtggagacttgtaagtgacctttggagaaggagaatagtatggtggaggtggagagttatacacgtatggtggtggtggagatttgtaatgaacctttggagaaggagagtaatatagtgggggtggggagctgtaaacgtatggtagtggtggagacttgtagtcaacctttggagaaggagaataatatggtaggggtgggaagctatagacgtatggtgggggggtcacttgtagcaaccataggagaaggagagtagtatggtgggggcggagaactgtaaacgtatggtggtgggggagacttgtagttaccttaggcgaaggagagtagtatggtgggggtggggactgtaacgtatggtggtggtgagatttgtagttcgttagccgaagagagtagtatggtggggatgggactgtagcgtatggtggtgtg

SEQ ID NO: 50516 - DNA, 540 bp, Arabidopsis thaliana columbia
ccatcaatcatcgcgtacgagcacgcacgttagaacgtaaaaacccgaaaactaaagctattctgacctcaagcaaagcctatgaaatttacactttatatcaccagcctataattttccattactactaagaatgtcagaacaaaaaagaatcaactataaccttttcaaactctctaactaatcatttcaaaaccatcaatcatcgcgtacgagcacgcacgaaagcacgtcaaaaccggaaaactaaagctactctgacctcaagcaaagcctatgaaattcacactttatatcaccaatcagagcctataagtttccattgaataactacaactttatcaactataacgttatcaaactctttaaacagttcttaaacacaatttcgagatatgaacgaaaacaaaactaatgaattttgactcacggcgaaagtagtagcggttgcgagattacaaaagccgcgaggacttcccaaggccttgagtccggcttctgctgcggtggtggaggatccatttcttatctttatcatct

SEQ ID NO: 50517 - DNA, 614 bp, Arabidopsis thaliana
tccaaattttaatgcgttttggatcaattgcatgtgatcgccaagtcgtttgtcaatgcaaaagcactactcgtgaactgcgagatcccaccacttgtctatgtgatcttgaccactcattggacatttgagaaatgtcttcttttgattgtcaatgatacgctcttcaaggtcaagatgtttgccacaaaaacagtttgtgggaacaccatattcaccattgtacttgcaaagatcatcaaattcaggtcgttcctctgatgaagaaggtgacgaataactaagcggcattatttgctgtagccagacacatgaaatcaaaaggagataaaatccaaaatccaaaccctaaatctataagagaatccaaaatccaaactctagagattatcaaactatcataaacggcaaccctaattccatttcaaaccataattcgatgcaaaaggggaaaaaatcaaacccataattccatttcaaaccctaaacccaaaccataattaatcaaattaaaacccgaaacttacctctggtgcttaaatggatgtcagagaatttggatccggcagcggatgcgtaatattcggtggcgtagcggaggtttgcgggagtgt

SEQ ID NO: 50518 - DNA, 536 bp, Arabidopsis thaliana
tctgaagtagtagtcggcgttgaagtcacagatggaagagcttcttcaactgtaagttgcatcacatgttcgctctcatctagcagcttagtatatgtagaagtttcactgtccaaatctgcattatcctctatggaagagaccaaaactcgctctagtgggtcttcttattcgatctctgaaatactatctgaagatgatgaagtgaaagaatctatcaaaaaggttttcccttctatgatcggtttcttgaccaaagtgttcatatcgaattgcatagtaaggtcgccaacattcagccctatcctcccttgttgaacatctatgattgctccagctgtgtgcaagaaggatctccctaggattaatggatccttaggttccttctcataaggcaagactacaaagtctgtaagaatcatgctctttccaattatcactggaacatcaataagaatttcatatggaattcgggtagaacgatctgccaacacaagagtgataaaggtaggctcaagattggaatcccaagacgc

SEQ ID NO: 50519 - DNA, 633 bp, Arabidopsis thaliana
acgttagatgtcatcatatgtgatgaaaatgtatgcttgagtgctattgattatatatatgaatctatattaattcaagaagtttcattacaacatatgctaatgtttctccttatttctttcgtttgatatagggatctaagatgcaggtcactcttagaaagcattatattggcaagtttcacaggtcattgaaggtcggtgattggaagatcattgataacttcaatttgagtccttccactggcaagtacaagatatcgagtttgagctatcccatgggctttaagcacaacactgaagtgagtaaatgtgattctgtatcggatagtgtttttcttgatcttgcggactttgaagggattaagaccgagagttatgatgagaatgttctaattggttagtattttctaaattccctatcatgttttaactcaaattctatcttttgttatgtattttaatagtaacagagtaatctttacaatggcagacatattaggtcaagtggtcagtgttggtaaagttgatgagattgttgctcaaacaaacaaacaaaaacttgagtttcaataagagatgcaggcaagtctcagagtcgtgtcaatattttgcaaatacagttattgttgg

SEQ ID NO: 50520 - DNA, 2132 bp, Arabidopsis thaliana
aactcaaattattcttaatataatgcaagttggattgagtatttctgtttctggcatcttatattcagcatagtagatacaaactgaaaccagaagatgttttggcacaatcttctgctttcaacaggattttgctattgatcagttttacttccataactttatctgcaccagattggcatcttatgccttgcgtcttgtaagagtatacattttgcaggcatgaggctccactagggcagatagctgctttttaacacatgaatatgtcgaatgctgcattcatcataatcatggttcatgattaggttttaggtgtgagtactagtaaggaaacagaattctaatgcatgcttagttcatcataacttacctcccataagtcacgagcattaacaatatctgatgaattgaggccaatctcagcccatcgagctgtgatgtttgcagatgctgatcctctgttccataggatgaccgctactcgtttcttgcttagtggacctgccataccttcattgcaccacatatgttatgtgtttttttgtttgtcatttgcatagatatgtacatataagaactatgtacctcaagatcaccttctttctttactttctttccctggatcccaagtttgtctgaacataaataggtcaagctcttaccacttttggatttcatatgagcagattctgaagtggttaagactttttctatattatatttaccttgattaacagcaatcacctctttgttgctaagcaattcaaatgtaactttgtccatcgatctaagatcgcagccgatcagcagaggagcctgcaaagagagaacacaatccaacattggtttaagtaggtatacattcattctctgcttagtttaggtcttttaggtaaaatactattcatacttttgccaatgcccagatgctgaaatgcgacatgtattcttccttagtcatgcctccatttcccacttcaagcatgtctggatctgtttcagttttaccaatattaatttctcgggtctcgatacaactttctcgaatctgtattgattactccaaattatttaccgttccacgatcctggtcttgcataagatgcccatcgatcattctgatccgctatcaatgtcatgctaacaagcaaaaaaggaagagaaaaacatcttcaagttcttgtttcactaagattgggaaaaaccatcaaagaagagaaaccttttccaattatcttggatatctcctgttgttctccaactgttgccaatatctcctgcccaagttgctggatcctcttgtcccctgcacttacaagtcaatttcttgtttagtatcatcagaccatagttgtctgaataagtgaatcttcttcttaattagtcttttttaccattcgcacagagagaagaatatggatcttcctgaatttaacagcgctttactcatcttagggtatctttctcttggacttgtccctgtattttcgcagttatcatacttgaggtaatcaatcccctgtcgaatacatgataacgaaaacgcacagcttcaaggttcaggaaatgagttcagacataacacatacaaatatacatacccatgaggcaaatgtcttggcatcttgttcttcatgcccgagtgatcccggcatggtttggctgcaggtaagagtcctagaaatcgagaaaaagatgatcaatggagaaactatatcttaacaagaattttgttttataactaagtatctttatctgtatatacatacccggcatcagagtatatcccaagttttagccctttgctatgaacataatctgataaagctttgattcctgaaggaaatgttgatgcttttgcaaccaaactcccctatcaaatatacaccaaaaacacatctcatttttgtttttagattctcaaaaactctgaaaacaaggttatttaacctgagaatctctcttgagttcacccaacaatcatctataaacacagataaaaacagaacacgatacttaagaaaacagagagatggataaaccagagtaatcacactaaaattatatataatttaagtacgtatgttgatatacttgtaacctattgcagaaagaccacttgaaaccat

SEQ ID NO: 50521 - DNA, 534 bp, Arabidopsis thaliana columbia
taaagatgaagaatcctacaaataaccaagcaaagggggcgatctactaaatcatatgaatccctagtgagaaaccctatccctaacaagcatactgctcagacatgatggatgaaatacacaacatatatgagtaagaaagcataaacaaatcagtagagaaaagagttagaaaagatttcttcacagttattgaaaatctgatgaaactctgaaaacatgggatgaatagcttggttgctaggaaacttgataaaaagcttgatagaaagcttgataaaaagcttgatatgtctaaacaatgacttttaaaactatatatatgaccttaaaaatgtgcagggactaataacgaaaataaggaagtcttctgggtcaaattttcaattcttcaaacttaaaagcatcatggatttctctgggccgcaactggtgttgatcgacaccaagagtgtgttgatcgatactctcgactggatttgaaagtgaattcgtccttaagcttgttttcttcatctttcgctccaaaatgtc

SEQ ID NO: 50522 - DNA, 932 bp, Arabidopsis thaliana columbia
ttttctgccaatgttacactttgtatctttaagatagcttcatcttttttctttgttgtgccgtgactctcatatgtaagtcatgagtttgattcgtgtattatcactcactttctcaatttagcaacaactcaaaagaaatatctctttctccagttatcttgtgacttggatttgcattttttttatacacttaaaattttgtttagttgttttttgaatggatccaaatttggattataggtccgcatattttgatttttgggagtatatttgaaatccgcatatctagtgttcaagaatcttgatatagaaagttgtaagatcatttgatatcctaaaactcagaattctttttttgggttcaaaagcaataactagttcttaagagcatatattgggaaaaaataaaaataaagatcaaggacgtgtttcatgattcagcagagttggtttttgttttgttttttgggttcaaaagcagagttggattttaatagataaagaaacatagagtacaagagtaaggcatagaattgaagtcagccaatttacatcgaaaattggagcgttagttaaaagaatttattgagagagttgcgacgccgtgcagcatcagcagagcagcctcacatgacttgcggtcccagcaaattacagaagaagaagacctatcctctctctttttgaacaacctgattatgcacgttgaaatacagtaacacgtctaacactagtatcatattaagtaaataatactaaatggaccatataactcttcattcaactttatcaataatgtaagtttgtaaggtattaattaaataccggggtttacttctcctatgattattttataacattagaattttgtagtagcattaggctgtattttgaaaagaaaaaacctttgtaatagcattactatttta

SEQ ID NO: 50523 - DNA, 570 bp, Arabidopsis thaliana
aaagatcctcttatccttgggcgagctttcctaactacagctggtgctaggattgatgtgaagagaggaaagatctctcttaacatttgtgatttggagatggaatttggtatggatggttcagagatcactagggctatcagtagcattgcctccagccatgacacatctccttagactgctcagaatccccaaacaaagctacacacaatgctcccatcagctcagctcgccaatgagaactgcagagaatcggtgtcgatcgacaccatccctcatgtcgattgacaccctcaggtttcacagacagaagattctgcaaactctctacaacctacacccattgtgcacctttgttctaagttctcttctatctcttctcctgctttacctttgattaattctttagattctttgaagtcttcttcacaagttaacaagcctagaattcttcgaaagcttgtttctccttttgatattgcaggaaacgaggagagtgtcgatcgcaccaccatgatttttgatcacacgtgcagctgccagacaggatttgtttcacaccgcttggaa

SEQ ID NO: 50524 - DNA, 413 bp, Arabidopsis thaliana columbia
ctaaaataatacttccaaattatttaatatcatttaattactataaaattatcatttttgatattgattttctccataactataacaattcgattataatcatcaaagcgcagagatataatctgatagcatttaattactacaaaattacaaaatatttagacaatgattcataagcatatcataaataagatcaacattaataaaataaatggttttttttataggacgggtttagcaggacgttacttaataacatttgtaaactataaaataaaattattttatagatagatacaatttgtaaacttttatatatactaactttaaaaaataaattgttcccgcggtatactgcgggttaaaatctagtacttggcaaaagtttagctttaggagttgtggtttgaatt

SEQ ID NO: 50525 - DNA, 364 bp, Arabidopsis thaliana
cgatttgccaggttttatgcccgaggcgtttcgaggtcgggtcgggggaccacttcatgagactgctccgaagcgttctcgacatcgcctcggtatggattcctgacgagatctccgaggcgttttatggcccggttcgggataactcatcgatgtctctcgctattaccacgtatagtcatcaatgacctcgatgccgcggtgtgtgaccaggtacccgaggaactcgccggatcttactctgaagcgacactttgcaggattgagtttgacgttgtagaggttaagctgcttgaaacattcgcgcaggtgggttatgtgatcttcctcttccatggatttcaccaacatgtcgtcaatgtag

SEQ ID NO: 50526 - DNA, 553 bp, Arabidopsis thaliana columbia
  unsure (1)..(553): unsure at all n locations
gtcatcaataagagtttaaaatttataaaaactgttttatggttatgcaagctacgagtttctcgtcgagcgctttttcgttcttttgatgattgtgcaggaaaaaggagtgttcctcccatacctgagtcccaccctgctgatgctcctctcttcctagatagacctcatgcgctaacagcttatacaccagcatggatgatgagaggtttttctccacggtatttaataccaccttctgaaccacatgattatagaaatcctgcaaaatcatgctaatgactgaaactaagcgtttagtgggaggcaacccactggtatgatttttatttttatttttcttttattttttgtttttgttttgtttatttcgcttactccggatttgaatgttactagggacagtgacgtttaagtttgggggagtcgcttactaactacatttttctttacgtgtcttattcttattcttatttttttttgagtcgttttattgagtcaaaattttgtttggaattatgatttctantctttagtttattgctggttgatt

SEQ ID NO: 50527 - DNA, 494 bp, Arabidopsis thaliana
cgattcgcgtcgcgattcatgcgacgcctccacggttttttctcaaccgtcgtcggcgacgacttcacggtcatggttttcgaaggttatatcagttcgatcgaagaaacaatcaaccaccaatacttgctacatcgaagatttgatcgcttccgaatccgatcatcatcatcataatcaaaatcgacctagacagagatattgtagaggaatgtcgccggcgggagattcaacgacgaacgatgaatcagttgaggaatctccagggagattaagaagaacgccggtgatgggaactccgggaaggaaaaagacggcgacgattgggattggtagaagtgtatcagggatggctttttgcttaagtccattagtgagagctaaacctaactgttcttctaactggaaagcgaaatttccgccggattttggatattccggtgaattgaaatctccggcgacgtcacctatcaacggcggcgtctttttgcggt

SEQ ID NO: 50528 - DNA, 475 bp, Arabidopsis thaliana columbia
catttaactaccttcccaaaatctctccgcattaattatacgattagttattaaaataaaacttccaaaatatttaatatcatttaaacactacaaaattatcatttttgatattgctttttttttatgactataacaattcgattataagaagcaaaccgtagagaatatttgatagcaattaatttactactacaattacaaaatattaagacaatgattcataagcatatcatagataaaattagtattaataaaataaatagatttttttacgggacgggttggcgggacgggtttggcaggacgttacttaataacaattgtaaactataaaacaaaaatattttatagatagatacaatttgcaaacttttatatatactaactttaagaaaataaattgtctccacagtatccgcgggttaaagtctagtaaactaaaaacacaagcttaatagacagtttaagttgt

SEQ ID NO: 50529 - DNA, 889 bp, Arabidopsis thaliana
cataccggggattaggcttgatgatgcctttctttgatcttgttaccatcggatgtgtagactgagttgcaggagctgctggcatggtagagctagtttctgactcagaaacaactggtacacttggtgaggatgctgtagagcttgaagcagaagaagtatcagtgtgattcgtcctgttactaagcaaagaagagttgttgcctataggtaagagatcagtgctctccgtacactcagaactcttttcactagcaacagtggacaacactaaagagttcttcactgaagacaatggaggaaaatcagtagcagggaacaaaggtgtggtacttgatcggatttcactgcaaacaaacggagaagcctgtgtgcctgcaacacttaaagaagaaggtctatttgaagagtcatcagatggagctgtttgtttcggcatgaagctttgctgccaagatgaatctttgagaaagctttaaacttgaactttagatttcattcattttctttaaggtttcatgcggcttacattttggtatttatataagagacattataagcttctaaaccctaggtaactctccagatgtcttcatcctgtagtctctaagccatcaagggctgagaattgattagcaagctctatcttctccgttcaagctttcgtcacctctgttctgtttcttttgtccttaagcgagagtgcagaagaccgttgcacagtgcacgacgacgtttctgttttgggcttaagtgttctgtggccagttcatttgtttctgcgcaggccaactgatgaagctgcaaaatgctgtcgtttaaagaggttgctgatacaattcgttataacacgtgtgtaatgtgcattgatgtgacaagaatgagtgtg

SEQ ID NO: 50530 - DNA, 1481 bp, Arabidopsis thaliana
attaaattttgcattaaagaaatggttagtgataaaatgatctgtcaaaatgttgtgcttacaaatctccattagataaataaattagtttctctctctcatctatctttttttttggttttccgacatagaatgctatctctctctctctaagcctatctcaaaacagagatcttaggagaagaagacaaaatctttaccaccagatcttttcttcttccttcatctttacaggttgtcacatcactataaccaccgaaactctcggcccaacccaaaaaaaaaaaagcttcctttcgaaaaaaatcaaagctttttcttttatcttcaattctcctccgatgaggtgtaaaagacacaccgtcgatctcagcagcagcaacggcgtttgcgcttcttgcctccgtgaacgtctcctctctctcgccgcttccgccgccgtatcagccgccgtagaagataatcaatcaaagaaatctaataacaataatcatcctccgcttttgattttccctcgctctgtttctccttacgttacccgtagaaaatccgacgccggagccggtggaggagatcctttagtttcttctaatcggagattcattaccacgccacagatagatctcgtcggatattcatgcaaagatttcgaatcgaatcgatcaaataaatcaaaacaaggtaaaaaagtatctagattctcgaatctattcagagctagatctgaagatttcgataccaatcccaaatccaacaatcctagattctcctcatgcgacgcgtctgagatttcatcttcttcttcctcttcacgttcatggatctcgacgattctctccaccggtcgacgtaaaaagcaaccaaccaccgcgtgttacatcgaagacgttatcgctgcgcgtagacctcaacgtatatactgtagaggaatgtcacctgtaagagatacggaaccggagcagtcggcggaatcaatcgaggaattgaggagaactccggcgacgaaaactccgggaaggaggaagattgcgatggggatagggaagagcatgtcggggatggctttttgtttgagtccgttggtgagagctagtcctaactgtccgtttaaacggaaaatgagatttccatcggagtttggtaattctggggaggtaacggcggtgccggaaaagcctcatatatcagcagcggcgtcgttttgtgcaaatagatcgaagaagcttgtggatttaggtagagttgatcgccgccgttgagtttttttattttggtgggattagtctttggtcaacgtgtttgactattggatagtaaactacggctttctgaagatggattttgccaaaatcaagctttttatatggcttgtggtgaataatctctatgggaaatagctcaaacaatacttttgttataaaaaattgtaatgttttctgattgtaattgtagagtttgaatggccaaatatattgttctta

SEQ ID NO: 50531 - DNA, 853 bp, Arabidopsis thaliana
  unsure (1)..(853): unsure at all n locations
accattaaaaaaaaaccatttcaatcaccggaactacattaaaaggtaaaaaacgattctatcaaataaaaatcctttcactcaccacaacaatcaaaaagcccaagtaggtaaaacccatctctgaatctgacaaactctccgatcatctccgtgattcatcactaacctccgagatcaacaaacctgatttccgtgagctagatcttggatcaccggtttctccgcttcgttctcagccacgtggactcaccaccaccactactactacaaccactagtagcagtagttctagctcttccggatctgtaacgggtcggattaaacatgctccggttatcggaagatctaattctgttcgtagtcaatctaattcgtctagtgggaataataatctaagaccgagatcggactctgctacaacttcttcttcttctcattcacaaccacttctctcctcctcctcctcctctgctacttctccagctccgacgtctccggcgaatgtacttcccaccggaaacatttgtccttctgggaagatccaaatcactggaatgactcaaagccgttcaagaagcgatgttcttggatctggtactggaacttatggacatggaagtataatgcgaggaggtggtatatctccggccaaacctaccaacaccggaggaggatccaactcgccggtaaatgtcggtagctctagtagaagtagtagtactgttgctacgggagagactcctatatggaaaaaagcgattttaggttcggattcagaggaagtgaagagagtagggaatgaaatgtataggaaaggtttgtntaatgaggctttgaagttgtatgatag

SEQ ID NO: 50532 - DNA, 915 bp, Arabidopsis thaliana
agtgacatacaatccatgtggctcctgaaaaactaaatcatgtatgcacaaccaatggaccatcttcattcattgctcatggaataaatttcattcattgttttaagatatttttaaggtttttagattttgtatgaaaatcccgtttatgcatagatatgtattgacttttatatattggttaataaagttacgttgagattgttctcccatatgtgaatcactaatgaatttaacatttgaaagacatgaatttttatctaatcaaaaaaagtcttttatctaattaatttttctctaacctacttgacagattttatgcgaattaaaaatctcaaatcaacaaaaacaaaacaaaacaaaagaagacgtaccgttgaaagtgtatcacttctgtcactctttcccgacaaagctcgtaatccactttcatcacagatctacagagtaatttacaacaaatcttttaagaatatatatacatatatatataacaaagaataaaaaccaaccgattagaaatggcgatcctttgggcgattttattacggtcttttaaccatcttcttcccactacagtggtggcagttttcagcaatttggccggtgttatggaatttccttggcccatctctccggtagatatctccatgatgttctctttccatcgtgatgttacaggagttgcggttcaaaaaattcctcgcctttatacctcctgaataatctatccctctcgcttctttctaccccttgagattttacttactcattcacaaaatggcagacaatttgcggcgagcagtacaagacatcaatctcggcgcaaacaatgctccagttactttatcggcggcagtggtggcccaaccggcggcagagaaccggttcatcctcatgggctgtccagttatc

SEQ ID NO: 50533 - DNA, 583 bp, Arabidopsis thaliana
ctaaagaatggctgccattttaatgtaacagaagatacaattgatgggttgaaagagttcgataaatataaaacacggatactggattcggggattaactgtaaaaaacatccgtggttatacttccctcttgcaaaatcctcaccggggatgattgttatggcatgcaataaaaactataaccaacatgaagtggcaaactgtttaaccctgtcttaccgtgagttaatcgtgattgattataaaaaaaacttattatttattttagtttttatcagtgggtttattctcttcactgtctattcttacactgcagaaaaaatgatatataacgaaacatgcactgcaaattgggtaatttttaatgaccagggacgagcaaatcttaccatcgactttatgtataacaaaaaaaataaaacaggaactgttgcgttgagtggaacctggcaacaaggtaacagagaaagtaaatcaatacggcgaaatattgaatacacatggattgaaaactatgacacagcccatttaacatcaaagaaagttaataagtttgagattatggatcaagttgatgatgata

SEQ ID NO: 50534 - DNA, 874 bp, Arabidopsis thaliana
gttaattaactgaaaaatacgtttactaatttttgtttttacctgcaaggctctgcctctgattacaaaacaagatcgattgtgtttcctgataataaaaataccttttttttttttgtagtagtagtagtagtagtttgaagtttgaaccactattacgtatctcttttgttgaaatcaactatgagtccgcgggacccacatagcgtcgtacttttccgatcatcgaataataaatcatcacagataaatcgacggctgtgattaatttacagtgtacaccttttccccactctaatcttcttttaagtgaagcagaaagcttccaaaagcttagccaacaaaaaatggcagaacttattccttggtactacacttcagggtcagggatcgtacttgtacttcaaaccatttttctcttctcgatcgtacgtgctgatttaccaggctcatgggaactcattgtacaagacgccggtatagcttctatgcacacggcggtgacccggttcaacacggtcatccttctagaccgaactaacatcggaccgtcgagaaaggctcttgaccgtcaccggtgccggagagacccaaaagacgccgctttgaaacgcgattgttacgctcactcggttctgttcgaccttggtacaaatcagatcagaccactgatgatacaaaccgacacgtggtgctcgtcgggccagtttttatccgacggatcgttgctacaaacgggtggggataaagatgggtttaaaaagatacgtaaattcgaaccctgtgacccgaacgaaacgtgcgattgggtggagctcaagataccgaattgataacggacgctggtacgcttctaaccagatattaccggatg

SEQ ID NO: 50535 - DNA, 565 bp, Arabidopsis thaliana
tccccgaaatataaatagatgttcccttcgacagtttgagacatcaactatatcgaactcctcgtcataagagcatgattcgccgttgatgcgacataacagttccgactcattactcatttttgtgatatcatggcgaggggaaatcacgacgcataccataaattgggaattaccacccaatgggagaagaatggacaaagaatttccttgggctctgtgatcaaactctgctggcacttctcttcctggtaacagaaccgacccggtagaatccgatgatcgtcggattattgcttcccgtgcttctccacccaatttaaagcaattggtgaaactgaggcgcgcacttggagtgtataaagggctagatacactctccagtgattcacaatcttcagcctctagggctttgattgaacaagggagatctggcaatgatgctagtcttgtgcagccagatagacaaagctcttctaactgatgaagagctttgatgcaatctggaatactctcaatatcagtatagcttaggtttagatgtgcaaactcgtggggagttgtg

SEQ ID NO: 50536 - DNA, 584 bp, Arabidopsis thaliana
gtagctattgtttaacataaggttatgaaattccaaactctccaaagtctcatcaactttctgttcaagctgttgtttacgttgcttattcttctcaatggtttgacacatattctcaaatagatgatacagtttcctctggtcttcctctacaatctgagagatacttttcaaatccctcttcttcttgacattcttcccaacagtatcacttcgattataatcatcctctctcgcaagccatccataaagcttatcatctctcaagcgatgaccttttccaaacaaagaaagtgaactctatcaatgtcaataaaagcaaatgacttttaaaaacaatgttttaccttttttccaatctctcttcccatgacggtctaaatcaaaactcttttcgaattgcatggcgctttcgaatcctttaaagtctttagcgaattcaaccaaagcaaaaccagtatgtcccttggtattccaaatgggtttgactcttgttggattaaccctttcagagtgaactcatcacgtaacgttgaaccgcttttgcctactctccgaccagatggttccactcagttggtacg

SEQ ID NO: 50537 - DNA, 1495 bp, Arabidopsis thaliana
ctaactctgaatcatatacattactcaaaaccttaaaaaggtttcttttttgtttgtctaggttgttcaaaacttgatctttcagtagctaaatatatggatcctctataatctcatttgtaaagctcttttattgcagctttaagatggagaaaaatcaacaaaagcaggaatttctagctgagacctcagagatgaagaacaccaaaaacaacgacgactgttctgtacaacaacaacaacgatttgtgtggccatgggttggtctagtagccaacataccaacggaggtggaaccatcgggtcggagagtaggcaaaagcggttcaacgttacgtgatgagttcactatgaaagggtttaatccaacaagagtccaacccatttgggatttcaagggtcattctggttttgctttggttgaattcgctaaagactttgaaggattcgaaagcgccatgaatttcgaaaggagttttaatttagaccgtcatgggaagagagattgggaaaaaggtaaaacattgtttcagagtttttaaagtcatttgctttcttgacattgatgagttcactttctttgtaaaaggtcatcgcttgagagacaataagctctatggatgggttgccagagaggatgattataatcgaagtgatactgttgggaagaacgtcaagaagaagagagatttgaaaagtatctctcagattgtggaggaagacgagaggaaaatggttcatcttgttgagaatatgtctcaaaccattgagaagaagaagcaaagtaaacaagagcttgaacagaaagttgatgagacttctcgtttcttggagagtttggaattgcataacgttctgttaaacaaaaactaccaagaaggtaaaatagaagcacttgaataagctttaaaaacataatctgttttgtgtttcatgctgacatgtatagtccttttggtttgtttgtgtgttattgtgatgagaagggtttcagaagatgcagatgaagatggaagagttgtatcaacaggttctggatggacatgaaaagtctttggcagaactggaggcaaagagggagaagcttgacgagcgtgcaagactgatcgagcaacgggctatcataaacgaagaagagatggaaaagtccagacttgaaagagaaatggtgattatgctttccttacaaagtaggagaaaaagatcacaaggcaataaaatctttgttgttgttgttgttgtagaatcaaaaggctatgtgtgagcagaatgaagcgaatgaggaagctatgaagcttgcagaaaagcaccaggcaagtagttcgttagtgtttctgtatatattcatgaacaagtaataactaagcttccatttccaacttttgagttcctgaactatgacaacttttgcagaaagagaaggagaagcttcataaaaggataatggaaatggaagctaagctaaatgaaacgcaagagctggagttggagatag

SEQ ID NO: 50538 - DNA, 485 bp, Arabidopsis thaliana
gacttaccagaagggtcaccaagtctagactggttcaccagaatgcggatagtgcacggagcagcgaaagggctcgagtacttgcacgactacgcagatcctcctgtgatctaccgcgatttcaaagcttcaaacatattgttacaatctgacttcaactcaaagctatcggatttcgggttagctagacttggaccaactgaaggcaaagatcatgtgtccacaagagtcatgggaacatacggatactgtgcccctgaatatgcgatgaccggtcaactcactgctaaatccgatgtctacagtttcggtgttgtccttcttgagatcatttccggaagacgagctattgatggcgatagaccaactgaagaacaaaacttgatctcttgggtatttcatcaagcaagagtcttgttaacatatttgtgttgttgcttgagaagaaagaaaccgatgaaagtctttttttttttggtttggca

SEQ ID NO: 50539 - DNA, 618 bp, Arabidopsis thaliana
tcaacaacttactctctaagcttttttcctctaaatgaactcctttctcatcttctggtgtaaacattctgttgtgaaatcattgttctctttgatagctagtgcagtttccatcttctctagatcaatgcccatcgaatacttattaactcttttttcaaaatctcaaagttgatctttcagcttcatcacccttgaagataacccctctatgactctgctttgccatttaaatttttttctcatctcataccagtcatcttctgtaggatcttcagtctgagctaaaccttttaaggttttcttctgatggccaaaagttctcttcagcttgcggagttgagaagtatagttaaatattggtggggttcgcctttgtttgccctcaagcaaaacaaaagattgaatctgtgaaagaggtttgaaaaatgtagaaactcccaatctctctagcttattaccctgagcatacaaaccaaatccatgcactaaagagttctagtcaaatcctgaccaccatataatttccactagccacactacatcctagattccatccaaagcactcaactatatcactaggttacattgttgggtccacaatcaagtaatgtttag

SEQ ID NO: 50540 - DNA, 620 bp, Arabidopsis thaliana columbia
tacttattatttttattttagtatattttaaatttatttaataatagaaagtgttattttaccatttttaaaaaaatgaaggtttaaaaacctacaacaaattgaggattttttttactaaattttggatatattaatttgtcctaaacgtcttactcaaacatgagtacacttaatcacatttacttttgatacttacataattacatgcatatatatttcataacacatatagtaatttacgtagatacgtgattactatcattttgtttgtagtttaagaaaatagaggataaatatatttaagataaaaaaactaaaaaatatttaaatacaaactaacctgtaataaattaatagaaacgagtcgcaagttcgtgaattacagttgatgtaggtcaaattaatcgtaagaccactctctcaaataaaagatcgattgtagcactttagggtcgaattccgaaaagctctcggatcacacaatagactagagtttcgaattaagctaaacaaatagggtataaaataagagacaaagaaaagcaataaaactcaagatataaatcagatagagaaaagtgtcaggtttagggtatctcaggaaatagatgatagta

SEQ ID NO: 50541 - DNA, 580 bp, Arabidopsis thaliana
caacatcgtttcaatggaggcgggtcacgaggcgtcggagtccagaaggtggtctctttggtttcttcacttgatcggacagtggagaatgcttcgcttttaatcactcgatcaaacggaccagaataaacctcaagaagtcactcgatcaaacggtagtgatgcttctctcatttggtcattcaaatcaccggcttaaagctctcttccgcactttactcgatcaacggttgagatgattgttgacttgttttgaatttactcgactgttgacttccttagggtcaataaaacaaacctgaaacacttaaacaaaaacatcaaaaataacaaaaaagatagaaagttatatacatggatagacatgggacttccacccacgtgagcttgttttaagttactaagcttgactcttactgagcttagtgagaaaaaaggttgaaggcgaaacagagaagtcctcatcttcagtggttgaatttttaatgcctgaatcatactctgcatcctctcatgacgtatggtatgatgagtactcatttgatttttctcacaataacctctttttgatcacagagta

SEQ ID NO: 50542 - DNA, 570 bp, Arabidopsis thaliana
ggtcctgagaggtgatctcaatgacgcgccaccagtaatgcttctgttgatccacctgtgtggatacaggaaatgggcgttgacaaactgcaagaagaaagtgagaggaacactatgcgtaggtggcgttgtgacgccgattctcgaagcttgtggagtaccgctcaagaaacaggggttagagccgagaatgatagatttggatcatttacgccgatgtgagttcttggagcatgacatggttggcaacttccacagctacaggttcaagcattcatcgatcagaatcgccaacatttttctcccctacattgacgctaccaggattctcgagggcaggaatattgacttctagcctacgcttgaagatctttatttcaagggcagtccgccaactgaggagatcagtcacacggaaggagctacaatagaagaagttgatgagacagatgaaatagatgaagcggagtttgacacgagcatgtctcatttcagtgagcatgtacctcagcgagggaaagcaagagtttgagtgaagctacaggaacactacaagttgcagaagtggtg

SEQ ID NO: 50543 - DNA, 1303 bp, Arabidopsis thaliana
tccaacttgatgataatttagacaacagcagcttcctaggtagtttctaaaacgtcggttcgttttctaaatacagaaaagagttgcgtgccgttttcactatcttaaggagtaattaattagtttcaagtaaaataccaaattagacaattccacatggtgatctttgatggcctccccaccaccgcacgtgaatttggaataccttgtttagtttcattatcaaattacacctaaacgcgttactaattaaattatttattgtctatcaaaaagccacgcaacaacagtctagcatttaaatcttcacgtgggtctaacccggttccggtttcattatccgggtatatgttttggcttcgtctgaatttgaatttgagttttctcattcaaaaaacgataaataaataaaatattggtcagttattctttctatggttcttgtttgatatagaaagaataacaggttttggatttgtctgtgtgtttggactttggattagtattcattcggtttaaccaatcaaaattcgcaaccttaacacgttataaaccatgatgtaatgatttaatcaatgatcaattaaatgtatagaaatttattttccatttccgcaacagctcaaaacgttttctctcttttccgattttagtctaaaaactgaaacaaacacaaaaagcaacaatttgtctttgaaaatctcctctgtgtatggttcagcttcggtttactaaatctctatgccgtcacgatcaatctcggcaccggttccggttcttgctccggctccgatcgtttcctctttagtcccagcagcgccgtcaggacatcagaataagacaacgcgaatctttccaccgttcgtggtggctggagccggcgccggtttctctcttttcatcactctctccgtctgtttctgtaaattcagccggaaacgttcatcacctccggcggaaaacgcttcctcttcgcctcggagaccgtcgccacgtgagttttcatattcgtctctccgtcgcgccaccggttctttctcgcaggcgaatagactaggtcagggcggatttggcgtcgtgtttcgtggaactatctccggcggcgagaatgtagctgttaaagtaatggattcaggatctcttcaaggagaaggtgagtttcagaacgagttgttcttcgccgccaagcttgactcgcctcacgttgtccctgttattggtttctctcatgatcgaaaacgacgacgtttgcttcttgtttacaagcttatggacaatggtaatctccaagacgccttgcttc

SEQ ID NO: 50544 - DNA, 594 bp, Arabidopsis thaliana
tctacatagatggtcaggactacaagaagtttgggcagccacagggtaacttcagtggcaatcggtttacagggaaccagagctacactccaaagcctgcctttcaaaagtcatttcctcatagcaacttcgagaggacatatggtaattcagcttaccaagccccccttccaccctcatcagagagcataatgcaatctatgcttgagaagattcttgagagccaaacaaagctcgttgtcgagtttaatggcaagtttgatgctgtctacacagatcttaatgggaagatcgacaatctgagctctcacttgaagaagctggatgtacaggtagctcaaactacacaatccattaagagacaagagggttttcttcctgttaatcctgatgctaacccaacgaagagctgtaatgccatcttgatcagagaaggagatgatgtgtggaaagaattagacattggagacgagttggagctcgctactgcagagttggtattgaccggacctacaagtgttgatcgacaccctatagaacactcttctatgagacgattcatacgaaggtgtcgatcgcacacctctagtgttg

SEQ ID NO: 50545 - DNA, 649 bp, Arabidopsis thaliana
caaaggaaagaatgtcttgagaggcgatctcaacaacgcaccaccagtaatgcctctactgatccacatgtgtggatacaagaagtgggcgttgacaaacggcaagaacaaggtgagaagagcactatgcgtgggtggcattgtgacaccaattctggaagcttgtggagtaccgctcaaggaaccaggtgtagcacctagaatgatggacttggatcatttgcgccgatgtgagttcttggagtatgacatggttggcgacttcgaccgctacaaattcgagcattcatcgattagaatcgtcaacattcttctcccctgaattgacactactaggattctcgagggaaggaacattgacttcaagcctgcacttgaagatctttatttcgagggcagtccgccaactgaggtgattagtcacaccgaaggagctacaacagaagatgctgatgagacagatgaaatagatgaggcggagtttgacacgagcatgtatcatttccgtgagcatatacctccaacgagggaaagcaagagtttgagcgaagctcacaggaacaacagcaagttgcagaagtggtgcaagaaacaggataagttactcgccaagtgcctcagagctatcaagcttcagaaggccaagcgg

SEQ ID NO: 50546 - DNA, 618 bp, Arabidopsis thaliana columbia
ggtgtgtatttatgatcatttagcttagtgatcagtcattgtatcatatcattttgcatcacatttagcttattttgcacaattaggcatttaggatcatcttgcatacatattgcatgttttggtgtgttttcgagtgtaaaaggagcttacaaggcattctactcaaccctctactctatcaaactaggagggaagcagcagagcattctactcgaccggtttactcgatctaggcagcagactttactcgaccctcccactcgatcctcaactcgaccagtttactcgatcatgggcaacctactctacaagacttgttgatcattcaaagtgttttctgatcctcctcattccccactcaaccaaacatctgagcataagaataggagaggaagaagcaactactcgaccaattgatcactcggagcatggacacaaaggcgcagactttgcaacaccctctttactcgatccccaagatcgagcactcgcccaaaccgcctcaagtctgttgtattctagtgaatctagggttttcaaccttttagtataaatagatcactttgggatttgtcaaaggatctagcttttactcttagttttctttgtgtcttg

SEQ ID NO: 50547 - DNA, 518 bp, Arabidopsis thaliana columbia
atcaagttcgtcgaatgcccatattcactttaagattcaagttctaacttaagctgaattccgattagttaagtctaagtgagtaagcatgcatataatctaaagactagctctagaaaacatacaaacaaacacacaattcgaccacaacttacggattcgatagcttggaaagttttctgggtcttgggtagaacttctcgagtacggtagacgattccttacccacggtcaagttttctcgaccacaggcgatgattctctggtctcggacagagtttccttgttcaagggcaaactttactgaattcgggcaagctttctcggtttcggacgagttaacgatcggacagccttacagtctctctctcttgccttcaaaaataaatttgggtgaagaaagctctatttatagcccgcccaaggtcggccagactgcaccgcccgctgcgacatgtccggacagctgccgcgcccacaggcgacaagtgtcttcggacgatggcgtggtgacaggt

SEQ ID NO: 50548 - DNA, 467 bp, Arabidopsis thaliana columbia
ctctgtgattgtatactctgttcttttagtgaatacccaaattgaaacttgatgtgatagaactaaaaagaagatgagtttttagtgaatctgattggtcttttctaaatactaatcgacttcatccttatcaaatgtgattggtttcatcatttgagctaattctatctgattcttgtacataattttagtattagtctctgtttgatgacatatcatttatgttacctccttactgatccattaaagtttagtgtggctatggcttatatagtcttttgcatttgaattcaactatgttcccgctaaaatgatatatggatgttgcagatgctagcttatcttcttgcatcagcttcaacttcagcttcgatccgcgtagatgattggcaatcaaactggggagcagacaagttcccagacttagctagagcatctgtcgcactgtcttacgtctcctttgtcgc

SEQ ID NO: 50549 - DNA, 748 bp, Arabidopsis thaliana columbia
tcctaaaattattccaactcaaacaagcttaactgttaagttctctcaagacgtttaaccaaaatgataagtgcactttagtgacatagctggccaaatcattttttaaacttttgtgcatgcaccaccatattcataaaatcgaggtgttacagttcacccacattatagatcccaacgtcctcgttgcgcaccatgaccgtcaccccgacggtgagagccttcttgactccgcacttatctggatctggctctgataccactgtaacacctcgatcgcccataccactcacgtcttctctcgagcccatgggcccaacctttgtcgatggtttgcctgctacatccgggaggtttaaagacttatttaccaaccctacaaatcaccacaaaatattttcccgtcttttttcctcactcacacagttttaaaaaccagttcccagaaggtgacccatcctgaaattactcgagcccaaacgtacttaattgtggagctctctttgaacgtttgaccgaaaagataactgaagtagccaaatcaaatattttaaacctctttgcatgcattatcatattcctaaaaccgggatattacattattggttctaaatatctttcgagttaaaacacttttagtaggcctaccagtgagagctttcttaactaaatctccttgtagtctttgttgaactgctaaaagtgaactaaagttaaatgattgtcgataaatcagagagttgttttt

SEQ ID NO: 50550 - DNA, 785 bp, Arabidopsis thaliana
taacgacttatttttattgcgtccgatttcatcatcacataaacccaaacccaccaacttgccccgaatacccaaacgagtcaacaccataacccttttgagctaactcgcccgagttattaaacccgtgactgctctcgacttcctcctccgtcttcaggtagccacagttgtactcgagattaggaacaacatgactcattccgagttccggtaccgagttattatgctcaacattaccggcaaaactagcccaatcgaagttagaagtatccgcaagaccgtggaacccggttttctgttcggttaagtccggtctgagcgacgagatgcggtttgggttagaaaactggaaatttctgttgtcgatctcttgatgaaacgaatcaagaacgtcttcaaagtgagaagaagacgacgtcgtggacgaagtaccgttgttgctgaattctctagcattcgcgattccattatcgtaaacttgtttttgtgcacttgattgcttcttgtatattcgacatagaacccaatcatccaactaaagaaaattaacaagaatattaattataggtcattcaaaacactacaagaagaaaatataagatatagtatttattaatgtttagattttatttgttacattagtgcttcagtttctacgagaaggttcaatgagacgatactcatgcatgatccaattggttttagtacctttaggagcttttccgatgtaaacaccaaagcttttttaatacaactctttgtcattagtcgagattatttta

SEQ ID NO: 50551 - DNA, 554 bp, Arabidopsis thaliana
atcagtgaaaattaggatatatcaacctccattatctcctcaatgaaatccgagaatattgaagtcatgcttctctggaaattgggtactatcggaaattgggtagatgatatcaacatcaagtaatttaagaatttcctttttaactacatctttcaaattcggatttaatctcctatgtggttcaacactagtatatgattcattttcgaggtggatcctatgagtacataaagtacgtgaaattcctttaatatcagctaatgaatacccaattgctttcctatactttctaagctcatttaacaattgatgcacttgttcatcacttaatccattgttgataatgacagggtaggtatcatttggaccaagaaacgcgtaccttggaccttttggaagaggcttacggtcaacctttggagccttggttaaggcacttgccaagtaatctttctccgtaagctcgttcagtaatacgtcgaccaatctatccaattctttgatcaaacgacttgtccattaattattggtttcttcatagctttgttgat

SEQ ID NO: 50552 - DNA, 916 bp, Arabidopsis thaliana columbia
cacacctttcttatcatctttctgaggtctcggaccgacgaaaattccctgaaaatccgcatcctcgtcgctgactccttcaacagcagaatgatttacgataccaccatctagtgatatgtaatcaggcgccggtgctgaacgtgactgcctcatcctctctttcttggctctaataatcgctgcctgatcagcaaacgcatcttcatgctgctcttcttccccttcctcatcgaagtccaaatccgaaacctgtttaactacatccttcagactctgctgctcatgatcctgcggaggtttgattaaacccttaagcactaccttcggctcggcattggcactagagcgagaataaggaagcgtccgtgtgttcttctggagctcgagcagcgcctctttcgaataagagccggcctgaggaagcacgttagaagaagcgggacgacgttccttggttgaagagtgtctgtgagaagatcccgaaacgccgagacgggaagaggatttgacacggtctctgccgttcttaggctttatcgtcacacggggagctccatcttcttcctcctcctcgtcgtcggcgaaacttaggagtttcttcttcggggccgaggctgagagtgttttaggtttcgaggaggaaagagtcgaagtcggttttgacgagggggtagcaactttaccgtcaatttcatcgccgccgtcgtcccctcgccgccggaaattcttaggacggttacttcccattctctctctctctctctctctctctctctcgaattagggattttacagttagggatccaaactttgaattagagaattgcaattgaactaatcctttgctttgcttttatgatcctcttgtatgtcatagaaagaaaaaaagggacaaatttaagaaggaaaaata

SEQ ID NO: 50553 - DNA, 520 bp, Arabidopsis thaliana columbia
atccccatccgtttttgatgaaatcattttctgaaaaaaatttcaaaaaatctgagaaagaattcaagaccacaacacaaaacacacaaagacaaataaaaagctatggtatgtacaatgtaggtggtggtgttacctcatcggtcaggtgaagtagacggatacgaactcgtccttactttctttagtataagcagggactgatgttgaggcggaagggtttgctcgtcctgtctggtcgagtagttggtcgagcgtgtggatgctcttctctgcctactccttggctctctcaaatcggagatcactttccgaggctcaaatgatgaagctcagggtcgatcgatcctgtcagccctccttgcatctaagctcgcagaaccgcttcttattactttggggtgggagacgggggccttggcttgctctggaagtcttttatttcagcttccatactcttcagcgacttcttcatggttccatcttctttttgaaacgtttcatcgttttgctgtgaagg

SEQ ID NO: 50554 - DNA, 832 bp, Arabidopsis thaliana
ggcaactctaattcctttgcaaaccataattcaatagaattgggagaaaatcaaaaccctaatttattttctatccaacccgaaacttaccaattaacttggacaaggcggctgatgcgaaagattcggcgtcggcggaggttcgttgtgttgtttgtcggcggaggttcgtcgtcaaagaagagagaaggagagaagaaaacttttcgagagaagaaaggagaagaaggaaataaagaaagagagagaaaaatttgtaatttaatgagatgagaaagattttttgaattgaaattgaaatacatagtgtgaacacatagtgtgaacgcatagtgtgaacacacaatagttattatgataataaaagtgaaatgcgggcccagacaaaatactgcgcattagccatagttgtgccataagttattcagttgtcccgtactcaatttatttgtactttgtggaagttttagtatttagagttggacttcattaagggaattaacttttagttggacagatgatataatatgtttaataataagatatcatgttttagttatataattttccaaatatatgcgttttgtcatgtttatgtcaagatggtccaacatgatacaatgcataccatataatgtaagaagtgttttttgaattgatgagtataatatgttcaattgtgttttagattgtatgataattagtataagtgattaataaatgttcaagaacaatgtataattatgagaaaaattaaaaaattacctccggttttaataatattatatttttgtagataaaataaataaactgtatttgtgtcataaatagt

SEQ ID NO: 50555 - DNA, 892 bp, Arabidopsis thaliana
gactctagattccacttcccagatcgaaaacgaatacccctcgggtccaagataagattcgaaacacgaatgttttttctgtattttgtttttctctgtatttattgagggttttagcttctgctgctccatattattggttcttaagtgaatacatgaggatcagattgggtttgtaagtgttatatgatgaaaaaggatttgaatgttgttgaaagctaaaacccaaacatgtcttaagctcaccacttgaggattgttgcgcacttgattcacaaatatgtatcccatcaattattctttttcaccgtgcgtcaggtttcttttcttaccggtttctgtgttatcatgtgatttctagatccggagattgttcagaagaaaaggagacttttgcctttaaatagcaattggacaagaaaatgcaaccaaagtatattactttttgatggatatctgaaccacacaagcaataagtatacaactgcatattacgagagtacacaatttttacatagtagcctagaagattcatgattcttcatataacaagagtagagaacttattataaatacaaaaatcgtaagtagatgtggtctagcctaattaatactccgacaattttgacggacttcaccttgagagccaagtttaacatcaagattgctcatcttgcgcatggcgtgttggaaatcaaagaagaacttggcttggttaagtgcatagccgttaacaagattcctggtccttggtgtgttgaataaagtttggtctgaaaagaggactcctgatttcatgtgaagcgcattgaagtaagcattgtcgaaacggttgcgcgtacatcaaagggttgctctcattgtcacagcgctgcatgttttagagagagtg

SEQ ID NO: 50556 - DNA, 582 bp, Arabidopsis thaliana
gttgatgagacagatgatatagatgaggcggattttgacacgagcatgtatcatttcagcgagcatatacctccatcgagggaaagcaagagtttgagcgaactccgtgtcattcagcgagcatgtatcattctccgttcatttcagaccactcgaccccttagtcgagtaggggacttcacaacttcatctcacccctcgaccccctggtcgagtatattcacctccaccacctgaccgtcactcgatcacatcactcgacctcgaggtcgagtgtcttcacctccactacctgatcatcactcgatcgcaccactccaccttgaagtcgagtatcaccatcacaaccactcgactacatactcgatggcgagcttcagagtcttctccattccgcactcaaccagacactcgagcacaaggaagaaaagaagactccagcttatcactcgacctctcactcgaccacctgggtcgagtacagttcttaatccgtcctaatactgcgtcgttttaagtattagggttttggaatattttgctataagtaccatgtactttacattttcgagaacaagtttt

SEQ ID NO: 50557 - DNA, 566 bp, Arabidopsis thaliana
atcatatatgagttgtctcagttgaacttaaaaaaatacattaaacttgcaaataattcaataaacttgcaaagaattcaatacaaatacgaaaacataaaacatagtacatcacacttacaaataatataatacaaatacaaatgaacttagttgtattggttgaaccctttctgcagttggccaggttgttccggtttaaccttttctgcattagacttaatcttcctcaggctgcagccaagcctccaaatttattctcctctttcgcgcttcaccaactgatggaaaccgcttctcttgatttcgtcctggtccttttggtgtgtattccggcggaaaggcaactaactctttaatatgggcaggaagaacccaaaccgactcatgtgggactacatacaacgtccggtaataggccaatgcccaactctctatcaagtaatacacagagcagagtccgtagatggttgtattcgcatttctcccttccttgcgggcgaggtgcctggctgcggccatagcatggacacacgggatcttgtctatatcacgacatttgcatg

SEQ ID NO: 50558 - DNA, 536 bp, Arabidopsis thaliana
caagaagcttgacagttgtcctaaatgcaacgcttcaagatggaaggctaacttgcacaatggtgaaataaagaaaggtgtcccacaaaaagtattaaggtactttccgataatcccgcgccataagagaatgtttaggtctgatgaaatgcctaaggatttaaggtggcactttagcaacaaaagcagcgatggaaaactccgtcaccctatagattcagtaacatgggatcagatgaatgcaaaatactcgtcatttgcagctgaagaaaggaacctgaggcttgggctttctacagatggatttaatccattcaacatgaagaacactagatatagttgctggcctgttttgttagttaactacaatctgccccctgatttatgcatgaagaaggagaacatcatgttgactttgctaattcctggtccgcaacagcctggtaataacattgacgtttacttagaacctcttatagaggatctatgccacctgtgggacaatggggaattgacatatgacgcttacagtaaat

SEQ ID NO: 50559 - DNA, 757 bp, Arabidopsis thaliana
tgtgaagatgagcatgacgtttgacttgttagttcaaaactcacttgatcctgacaaaaacaggtgcttcgttggtttaataagatggatgctcaaggaaaaaagttttacctaaagctccccactttcagctgcttttgatctaaggactgagcatgacatatgacttgttcaatatttacataatcctgacaatatcaggtgaaccattttatacaccagcttatgttatatgatttttctatggatccgcttgttagaatatgtacataaaatgtgacttattcgaccaaacccataattgaaaattcatataattttgttggcagattacagttttaagacaacagtaaggacgttgaccttcattgcttccaagcattcgaaacctattaagagctccacttaatataatattatatcggagaaggtggatcggccatggctactactctcagctcatcctctctcttcatccaattcagaggacggagatacaactccctatcatcattcaacaatctccaaaagcgcaccgttttgtcgctttcttgtgctctatcctcacaaggtggagacatgattccaccagagggaaaaagcaatgatcgcaactctgcctttgacttcaagtcgtatatgatccgtaaagccgaatccgtaagtgcggctctcaacgtttcggtacctctccaagaaccactcacgatacaagaggcggtgcggtactcattactagcgggcggaaaacgtgtga

SEQ ID NO: 50560 - DNA, 575 bp, Arabidopsis thaliana columbia
cttcccaaaaccctccctaaccaatttcaacacatcttcctcaaatacaattcaaagatctaacatatcaaagtacaaaaaaaataagaacaataacaggacattttgagggtgttttagggtttacgttttgagaaattgcgcgtggcagtgaggagttcgcggtaactgaatcggatcaaagaatcggccaccggagaaatactcttctccagtgaaaggcctctcgaccaattcatctcacctgtcaattctcctgtctcattctccagattcactagcagaaccgtctctgatccttcagacactggaaaattccgataagacaacgaaggtttctcctttttaatcttctccagctccaactgtgagcaaagactaaacctaaacgaagactgcaacgaatgttgttctgagtcaataagcttcggctctgtttcagccagaagccaagctttgttgtcctcacgagagctggttcgaggaggacaaaacaaggaaaacccaaatcaagaatcatttttttcaaatgagtttttattctagattgttgcctgaggatttgtatttgggtt

SEQ ID NO: 50561 - DNA, 699 bp, Arabidopsis thaliana
agctgtagctaaaaatggtcgtcccagtatcaaaggatctttgggctcttcatccatttctaaaactttaaagtctgtaggtacttcgaccacgcatatcatgactggtagatcttccaacagaccatggggaattctgacagatctgtcagctaggatcaaggatatattgcatggcttgtacttgctgaagcccagtttctttgccacagagagaggcatgagactcacagatacagcacccaccttatgcacccatagaatccatcttgaaaatgaatcctactcgagcatttaacctcaaaggagaataaacccgaacttgaaagaggttgtgaaaaaggagatacttaaactattagatgctggggttatctaccctatctctgatagcacttgggtatctccagttcactgagttcctaaaaagggaggtatgacagttgttaaaaattctaaagatgaactgatacccactaggactataactggacataggatgtgtattgactataggaagttaaatgctgcgtctaggaaagaccatttcccattccccttcattgatcaaatgctacaaagattagtaaaccatccttactattgcttcttggatggttatagcggatttatcaaatccctattcacccaaatgaccaagaaaaaactacttttacttgtccttatggaacttttgct

SEQ ID NO: 50562 - DNA, 970 bp, Arabidopsis thaliana columbia
gaatgacgaaaatagaatattaagggtcatctttgaagccaaagggtcttttctatttcaaattatatctttaattattatgttatgtttctaggcagccttggagtatgttccaaaacttgtctctttctcttctcttcttcttctctttataaactcttgtaatctcttatgagaacctatatttcttttaatcaaaaaccttttctaagaagatcatcttgttggtgtgtatatccagcaaacccttagtctcttttggtgcgtatatccaaaggatctaagtttcggtatcttgaagctcttccgcaagcttctgtgatatccatcgactcattcaaatatatccatcatcacggcttcacagccacatctatccctttctcaacttaagagtgtcgagtccttgggaggatctcatcagatttgatgcttcccgttgaaccggcgctggagactaattggaggctttccgtcaaaccgccgctggagattgtttcgacatggaggctagacgatgaacagatcctccagatctaggttgagtggatctggatgctcgaaatggagtcgatccagatccgggaggagatccttcgcctgactggaaaagttgcgtcggaagaggataatccttgacggttggacccgttggaggctgtgcaatcggctctcgttcagaatcttgaagcggggtttaacgatttgccgacgtgaacacgtactgggtcggaagaccatggatcctcaattcaaggtctttgattcaactcgtacatgctgggaagaagtgggtcaatttggggggggggggaacttcgatcccttcctcttcctctcttgcctttttcaccacgagtctttcattaatgaagcgttcaattgagagattgagaggattgatgaagaattgggatcaaatcggtaaaagggattagggttagggtctcgcgaaagagaaggaaagggg

SEQ ID NO: 50563 - DNA, 510 bp, Arabidopsis thaliana columbia
gagaaaattaaaacaaagtaaagaaatgaaatggcaaacaaaaatataaagagagagaggaaatattcgtaaattaaaaggtcaaagacgacgaaacgttaaattaaagtggtccatgtgtatactttggtggagcccaatgccacaccaaacgacccaacccattcgaagcttcaccacattttctttctcgtgtgtgtttcttttgactgtttttctaactcttttttatgactttcactttaagaaattggatctttatcttactactaagtctaagtgttaaccacagaggaagaagaagcaatttaggtggatcattttacggatttgattttttactttgatcttaacaaaattgcttcttttggtaataaagtaattaaatttataaaactttaaaatgaaaatgtggagcccataaaagatctctgaagttgatggagaccatagaaacgagagacttaactgctttttgagacaacaattggtaatggattatgcaattat

SEQ ID NO: 50564 - DNA, 1251 bp, Arabidopsis thaliana
tttaaacgcacaaggagaaatacgttctagtctctgatcactcctcttatttttatgggaaattgaaacaacaacttttatatatgagtttctctcactgtaaacttaagccgcctactttgttttactagatttgttaagaacacacaagttaaagaaaatcaactcaaatctaaaactctcttttggttccctcaaatctctccataaagctcataaggactatcacatctccataactccttatatgagaaacttaaaaccaaaacctatttgttttagataactcctaaacaaatatttagataactctaaatatcctagcttttatctcttttctcaataataacttattcttaagttatcttcttcaaacttaatccaacattatcccctttaagcttgaagtcacattcaaccacttcttgaacaccaatgagatctctcatctctttaaacttcattctcccaaaggcctttgttaagatgtcagccttctgttcattaccaggaacatgtttcacttccacttgaccgctttcaacttgttcccttatgaaatgataacttctatgaatatgtttacttcgtccatggaaaacgggattcttggtaagtgcaatggcggattgattgtcgattcgaatgagagtcttctcatatgttaaccccgtaacctcactaagcaaatcttggagccatgttgcctgtcttgttgcttttgttgctgccataaactcagcttcacatgaagacattgctacaatatcttgttttggagagcaccatgaaaccggacttcctccaaggtagaaaatgtgaccagatgtgcttttcccatcgtcgggatcaacgttatggctgctgtcactataccctattggctttggtacctttgttgacgatcggttgaacttcaggccgacagtggtggtgcctcgtagataccttagacaatgcctcattgctgctctgtgggattccttgggttcttgcatattacggctcataactccgagactagaactcaaatctggtcttgtgtgtggtaggtagcgaaggcagcacactgtttttcctgtaccatgtagcgtcgatctctttctcgcaattgtaatcctgactgcattggcgtgttcagcaagttacacttcatcatcatcgccagcttcttctaaaatcttcaaagcataacgcctttgactcaaagtgattctaccttcatgttgacacacttcgattctgagataa

SEQ ID NO: 50565 - DNA, 459 bp, Arabidopsis thaliana
gaatgttgagtttctctataaagtcatcagcttctttggattcctcaggtgaatccattgttatcaatggctcatcgacgttatcagctactaaaactgctgctacaccggattgttgaccgttccatacctttaatgcaaagtaacactctaatgcaaaacaaaacaatgaatcaaaaccaaatatttaccatttctgtcacatatgtaaataacagaactttctacatctacacagaaatatggaacaaatcaaatagaaagacttgtctcaatctcaatgaacttaaaaagagaaagcttttaagttcttcaacaaactaaattaagattgagacaagtctggtataccagaaagttggaacattaccaaatttgaagtaatatttggatcaaaaggagattgaaagatgtaaactaagacttaaaagagagagctttaaaggttaagacaagtct

SEQ ID NO: 50566 - DNA, 588 bp, Arabidopsis thaliana
cctgcaacaaacgtaaaacccacaaaagaaattcgaagcacaagttttgaaactctgtttttttattgatcagaaacaatgtctttgattcataaaggagccaccttggctctgtttctagcgttgactatggtggtcaacggagttttcgggagattcatcgttgagaagagtagcgtgacgattctaaaccctttggcaatgcggtctaagcacgacgcagccattgctaacttcggtgttcctaactacggtggttacatgatcggctccgtcgtttacgccggtcaaggagcttatggatgtgactcttttgacaaaactttcaaacccaaattccctcgtcctaccattttgatcatcgatcgtggaggtaactgtttcattcaaattgttccaaattgcaagtttttggttagaaatagaaagttttgtcatttacatgaaagttttgttgtataatatagcaaaagatttctcttttatgacttagttttacatctttcatccaaattcttttgcaagttatataatcaaccaaatttatggttaagagatagaaagttttgtcatttacataggagactt

SEQ ID NO: 50567 - DNA, 973 bp, Arabidopsis thaliana
ccggtacaatttcatctcttattgaagcaagcttttgaaaagtccccaaatcattgttatctgcctcaactctacttatcttaccaagcggttcagaagcatctcttccactattccgtacatcactatacttcttcttattaagtctcagaaattgagcaatggagaggttatcatcttcatcattattgtctgaatgaacatgtgtatgacattgacccatatgactctcattgttctcacgaactcgtttcatgtacttgcgtctcttgtcgaaatcctcagctatcttcattccatctttgcttgttctgttcaccttagagcctgaaagaacaaaactagtatcacacctatgatgtttcttgatttcaatgtttcacctgactcattgttaccgttttttcgagcttgctttatgtactggagtcttttttcacgagcttgcttcatgtatttgagtcttttgtcacgagcttgcttattgtaattgcgtctcttgtttgaatcgtcagttatattcatttcatcctttcttgttctgttcatcttagagcctgcagcaacaaaattagtatcatcacctatgatgtttccttatttcaatatttcagttgattcattgttacagttttcactagctttcttcatgtacttgcgtctcttattcttgctttatgttcttgcgtcttgtgtttgtcgaatcctgagcatgaattttcatattatccttgcctttcttgttcatcttggagccagaaggaacaaaactagtatcagcccctaggctttttctgtctctagctttcaatgtttcagctgattcattagcatccttatccttagaagaagtctggaattctggaaacgacctcctccaccattcgcagaacgttggagtaacacgaggtattgcagaacgtgaaggaatgaataatgctaaatcgttaataggcttattgtaatcattcca

SEQ ID NO: 50568 - DNA, 551 bp, Arabidopsis thaliana columbia
aacaaacaaacacccaatttggcaacagcgccaaattgataataggtttttaagatcaattaatcctaaagcactatcatatcgttgtagtactgaaggttgtcaatccaaatgggtgtgatgctaacaatcaagatgtgatcagaagtcactaagtcaagccaagcaataacaggttgtggtgtgttctagcagttctaagtgaacatgcagaaaacagaaattcaagtagaaacagaaaaacactcgaccaacacagctctttgcagagcaatgggtgaggtcgagtgacaggtcgagtaacagacagaaaataaaacacagatactcgactgcacagtctgttgccagacaacagggtggtcgagtatgaggtcgagtaacaaaaaagaactgcagaaattaaaccacagataacaagatgcagtaaacaacagtagagtaaaaaaaaaattcaataagataaaaaattttcgaggatggggtaattgagtagtttcgtttcctcagtttacaggtgattgacatgctcaataaattaaccctagaca

SEQ ID NO: 50569 - DNA, 552 bp, Arabidopsis thaliana columbia
ctttaaaaagtatgaaataataaagtaaaataaaagtagtaattgatttatttaaataaataattttataaattttttattttgaataaaatcatttaagaaatgaattaatggaagatttaacacaatatgagacttttgattttctctcaattaattttgctgatttttaatttaatcaatgttaaatgacacatgtcattttcttgtgtgatgatgtgtcactcatatggagaaagttggccaactttcatatatatgattctccctataagaacttcgatatcaaaaagcctaaattaaagaacaaaactaacttcaaaacattgtcacgactaaggatgttacaaacccaagaaactaaagagagctctcatcaatactagctagaagctactattactctattagacaacacaagaatatacatagaaacaaaactgggaccaacataattcattacctaactatcaaaatttatcatcatgctcaaaatcttgtttcccaatccgcgacaatttaaaacttgtctggagctcgattattgaccgg

SEQ ID NO: 50570 - DNA, 603 bp, Arabidopsis thaliana columbia
  unsure (1)..(603): unsure at all n locations
gacaagaaagcaattaaagttggtttttgattcagatgattaagatgtcgggtttagggaaattctcaggaaatatcagaatagtagatctagcagtaaattaggattattattgaaccattctagaacacaaatcactaatataaagtaaccgatgagtgttccgcaaaactcactatgcttaatagtattgatcccaactctcttgtaaatccctagaactaagcaagcattataatcaggtttgataagttcacctaagtaatcgacgctagcacacatctaagatagttccagtaatagatacctaaggtgggcatacctattaacctaaaatcaggttctagttagttactctaaaactagcattaagaacaatctaagatgaagaattctaaatatattatcttaacagggttttcgatctactaattcatccaaatccctaatgagaatcctaaacccaacaagagaataactcagacatgattagcaaagaagaaatcaatgtaagaaacaatgaaacaatagagtttaganagatcttctctaaagggaatctcccagggttttgctcacaagaataaaagagataataagaat

SEQ ID NO: 50571 - DNA, 600 bp, Arabidopsis thaliana columbia
tgacttgggaagtggtgaaacgttggaggccctttttactattgtaaagagacatatcggtcacagaagtggacaatgtagcccagaagttaggagctataatacaacattttcactttatttctcatccatttttaaaacttttcactttttttcctcaaattttactattttatataaatgtcatcgatggataaactaatgagtgattcagccaaatattttgaataactttatttttttatttttttattttttttatttttttatttttttattttttttattttgaataacttgagtttaactaagatttcagatgattttaagtgaatttatggaacaaagatttgctaatttattagtttaatagccttacattttaagacatatctataaataaaataactaataacaagtatttagcaaaaaaacaaactaataacaacaagttttttaagagtttaaatttgcttgattgttattctaaataatacaatttcaattgtatgattgaataccctacacaaaataattgatttaagaaaaagaagaagacaaaataatttgtgaaagaagaagaaaaaaaagcaataatac

SEQ ID NO: 50572 - DNA, 524 bp, Arabidopsis thaliana columbia
gcacttcaagaaggactagataatttggacggtatcactagtaagaggagacgagtgccacagctagcgggttctcagaaatatccgtatgtaggaaattcaacagtgaagcgcataatcactgatgtaccatcgtcttcatcggtacctgaacatcttcaacctgtttctgatgaccaatttgataggctgaaggattggctcgaacctgatttgtaagtctctattttttcttcaaatataaatgctatcattactcattcctttttttttctgcagtgaaaaagaaggcctgaacaccaacaactttaatgcacggttctattggcagataatgactccaagaaacgactggccaacagaaagatatggatggctgaaagactatgtaagtatagcaaattttaaatgtttttgctttcaattgattaaatcatttactgttggctggctgaaactatatgtaactctaataattgttgttctgattataatgcagcacatgggagctgcaatgtcattgt

SEQ ID NO: 50573 - DNA, 881 bp, Arabidopsis thaliana
tatttttaactcggattcggttgtaaatctgttttggtactctccagtggcttcaataggcaatgaagcagaagagttgtgtctatgcatgttcttgacgttagcttgtagctatcctgaaaaataagtatccggtgactgctgtagcacttccaagcattccaccagcaacgacctgaattctcagcaaatggaaaacagaatctgatgagaactagaaattcattgatatcaacacggttacaaatcaaagagtagttcatttatcaaccaaagtaaacacaaactagggtctgttctagagttccatcagctcacacaagcctccaaaagaccctcaactctgttcccaattacacgatccccctcaccgattccttcagcactctatttgtactcatgatttccctaactctgtaactatcttgctaaatgtaacagctaaaagaatctcatatcttgctagtcatatatgaaaagactttttcaagtcatatgtctacatacctggggaggggtatgaccaagaagttcccgcaaaggtctgctttcagccagcggatgttctgcaggaagttcatatacaatctgattgagaacctgaaaaatgaatcagaccccagagatcaggataccagagctcaaatgcatcatgacaaaaccaatagtggttcttttatcaaaccagtcaagttagaagatgaaacaaaggaaaggttagagcagcaatgaacaaacctcagcttgacgaccagcatgtaatctaacaccggtagcatcatacatcacctaccaacccaaaccactcacatattaatcgtcacttgattccttaatagccaatttgattaaactagagaaagtatcaacttacaacagat

SEQ ID NO: 50574 - DNA, 173 bp, Arabidopsis thaliana
cactcgaccaccttgatgaattcgataagttctgtaacctaacaaaaatcaatggtgtcagtgaagacagattcaaactccgtttgtttccattctccttgggcgacaaagcacacatctgggagaagaatttgccccatgactcaatcaccacctaggatgattgcaagaag

SEQ ID NO: 50575 - DNA, 605 bp, Arabidopsis thaliana
gctatcgacgctcttcctaaagcaatattcgatgctaatcgatccacgtcagacgccgatctatggtcattatctcagcagccaaatgagccacttcgagacttcctcgcaaaattccgatctaccctagccaaagtcgaaggaatcaacgacgtagcagctctctctgctctgaagaaagcactgtgctacaagtccgaatttcggaaggagctaaacttgtccaagccgcagacaatcagagatgccctacaccgagcctcggattacgtttcccatgaagaagaaatggaactactatcaaaaagacatgaaccgcctaagcaaatgcctcgtagcgataaatcccaattcagatctccgaaccacaaaaagggcgctcaagacgggacattcattcaccatgaaggacgaaatttctctgaagcccacaattaccaagctgatacaccccgaggccgaggacgaggccgcggtcgaggacgcgggcgagaatcctacacttggacgaatgaccaacccgcaagaaacgagcaggaatactgtgagttcacaagagttacggcaccatacttccagatgtcgtagcctcggggcaaagttgg

SEQ ID NO: 50576 - DNA, 579 bp, Arabidopsis thaliana
ggagatggaatcgtgatcgagtgaagcgatcaagtgatgtagctcgccttgggatcgagtgaggtgatcgagtgggtcattggtgcgatcgagtggtctcaactcctcaaagtcttctgagtcatcgacttccctgctcatatccatcagcttctggtatcccaaagtttccacatgtaagtctttttctctactgtctttggtcagggcactctgtaagtggtcctcctctgctagttcttctaaaagctcgtcagctagcaatttcgtctcttctatccagaaaactttatcctctattgtgggcttttttatcatgttggtgatgtcgacagtcatccgaagatctttcccgaggttgaggtcgatctttcctttcttgacatcgatgatggctcctgctatagctaaaaatcatcttcccaaaatcaatgggtctttcggctcttcctccatatccagcatcacaaagtcggtaggtacttctatagaacctatcttgacaggtaagtctccaacaggccatgaggtatctgatggatctgccgccagaattagcgaaatgttgcaagtttatat

SEQ ID NO: 50577 - DNA, 881 bp, Arabidopsis thaliana columbia
cataaattgttcaatctccattattaatatacgtgtaccttgataatttttgcccatgacacaatatgttctttgttatcttccatttagacactttccattgttttctctaataattcaatcacttttttttttcagataagacatgcaacatgcactacaaatatacaataggacgtgtttaaaagataagttcattttaacctaagaaaatattatgctagttttaaccgttcagaataattatcggcattatatgatctatgaatcaatctatcatccatgatactcatgaaaatgtagtattcgtttgctttcatttatttcttaacccttttatacgatgtgacaagtcaactgtactaccatttattttccagaagaataaggcttatttatatatatcgaggatccgaatggtgactgcgttttgcggtgcgggaaaaatgcggtgcggttcaaataataacgacaatacatgaatacatatatctatatatagattttgatattactacagcattgttgcattgcggttttaggtgcggtttatatcatcatttatgacctgaattacaaaacaaattttggtccttataaaacaaattttggaaacaaattatgtttagtaagaccaacatttgtttttttgggttaaagaccacgatgtgttttcaacagaaaagagataaggctgtgagaaagtgtcagatcacacaggaaaggaaacatgcattgtggcattgttagctaaaagaaacaaaattcgaattgtgacatatgaatacagaagaaacatcagtattcttgcgaggatttgatacacatatcgctctgtaatattttttagcttatatatcaaaattgcagggaggggagtg

SEQ ID NO: 50578 - DNA, 582 bp, Arabidopsis thaliana columbia
  unsure (1)..(582): unsure at all n locations
tggtttataggtgtgtaataagaatcggcttatctactaaggttaacaattaaactcgtttagaatacatgtttaggttaaagatttctcggcttctccagttattcttagctataaacatagagagtttcgaggaacaccactggttattccatagttagagtttgagtttaggaatggttcgataacaacctagctttcattagatctactaaccaataagatcctgagaattccctgttcctagctctttatttaatcgtttacaatactatcaatttgctgtctatttactttgttctcattttatttcgatcatcacctgctagcttaatctcgacattcaactcattgtttgaacaaaagaactttgtggaaatcgatccttaaatactgcaattgatctcttatttgagagagtagtttttagggtaatttgaaccatattagccttccaaattcgtgttcctcatattgggcttgggctagattgataatggggattttggaagttttaatcaagcctcattaaaaacctactaaggaaaactcaatgggacaanactttagaaggaaaaagag

SEQ ID NO: 50579 - DNA, 534 bp, Arabidopsis thaliana
tcaaacaaagtttgctgccattacaaaggcatttattcggaaaaagtaaaaaacgatcaaacaattgatctaatcttattaaatttcaaaaagcagaaaacatcagatcgcccgattcgaaacagaatggttatccctcagaaggcgatctggcataggccataccaactgcaagtcgactttctcccaatcctctgacagaatctccaacgctttgaccatctgtttgaattcatccagacgagcagtaactttcttctgcttagctcttattttggcgacttcggcttcaagttcctccggacgggaatccaccttgcgcttcttatttcggaaatactgaagttcacgaaattgatcctggtgcataaatccgacctggatcgagaatgaaaggcggagataataaacatcaagataaagcaagaagaataaaatagatggttcatacctggttgacaagttttgagattcggtaacttcagcatcagaagttgacggcctgagataaaacagtgagggcgttctgggaat

SEQ ID NO: 50580 - DNA, 485 bp, Arabidopsis thaliana
ccaacaaacacaacctctcctaccgtagcaccaacgttgctaatcctcaggatcaggtgtatcctccacagcaacaacaaggtcagaacaaaccttttgttccctacaaccaaggttttgttccaaagcagcaatttcaggggaattaccagccgcaaccaccaactgggtttgcacctcagcaaaaccaaggtcctgaagctcctgatgctgaaatgaaacagatggtacaacagctgctacagggacaagcatctagctccatggaaattgctaagaagttatctgaattgcaccataagctggactgcaactacaatgacctgaatgccaaagtggaggcatttaatatcaaagtcagatacttggaaagacaatcaacatctacctctgcacctaaagttacaggattttctgggaagtcaatacagaatccaaaggagtatgcaactgctcacgccataactatctgctaggatcgagag

SEQ ID NO: 50581 - DNA, 468 bp, Arabidopsis thaliana
aacagagaccacaatgaagagttgattgttgtttatactaccttgaacggatgtaatagacccatacatatttgcactcgacgtctctgcccatcagaaaccttatgcatacgccattgaagattgatatcaagaagatcaatcaacttctctcttctgaaaggatcaatcccttcaactaaacacaaaacatattcagagtataagcacaacgaaacaattcactaaaaactcatactaggatcagagaatctcacctccaaatatcatatgttctgctgagaagtctccttggagtggaatatcaccctaaagaattttaaagaattagaaacaaaacgttctcacatcaaaactcttgcagtgtattaactttgagatctcagtactcacagcagaaccagcagttttactccatgatcgtcctaggtaagacaaatcaccactacaaacaagctctgtatcatg

SEQ ID NO: 50582 - DNA, 1060 bp, Arabidopsis thaliana
aaaggggtcgcaaccgagaagattaaatgtcgagtttcttttggaatgttcgcggtcggtacagatctgctaagcattccatcattcgcatattggtaaatagaagctcactatagtttggttgtcttttagagacgagggttaaggaaggtcgggcatctggtattatgtcatcaatttttaatgattggtcatctatgacaaattatgaatcacactggttagatcgcattttgggtagtttgaagagaaagtgcgaggttgactcatgtattcaagagcagtcaaatgatcacttgttctgttttgttggacggtcgagaagatagatttttccgcaccttcgtttatgcatcatattttgtggaggaaagaaaaatactttgggaggatatatgttgtcaccatgattcaccattgtttagaaataaaccatggatgatttgcagagatttcaatgagatccttgatggggattagagatttcgaggatgttatacgatattgttccataactgatcttagatatcatggtcccttatttacatggtgtaacaagagggaggagggtcttatttgcaaaacattagaccgcattctggtgaatgaagaaaggtgtgatgtttttgcacattcttatagtgtatttgagtcggggggctgctcagatcacgctaggggtcggataaacctggaggctatggctcgaagtggttgcaaaccctttaaattcttaaatgtgctaacaaagattcccaagtttcaatctgtagtagaggaccagcggacaaacacaccggccctgttttcttctactttgcactacatcgtttttcgaagaagttaaaggcattgaagccgagcttgcgatctctaagtaaagagaaactgcgggatcttccaaataggactcgtgaaacctatgataatcgcatccatcggcacaaacgatccaaaaagaatctatggctcacacgaattggcagtatctcgctgatttggaagaaggctatctcaagcagaaatctaagcttcactggatgaatgtatgtgaccagac

SEQ ID NO: 50583 - DNA, 555 bp, Arabidopsis thaliana columbia
ggtttagtatatcgccccctttgctagaatatctgtagagtaattaatgctagatctagagtaattaactagattttgaatccaaacaatagataccataggtatctatagttggatctattatttgatgagcctggtttataggtgtgtaataagaatcggcttatctactaggagaacaattgaactcgtttagaatgcatgtttaggttaaaaatctctcttattctccggttattcctctgctataggcatagggagtttcgcagaacacagccggttatttaataattagagtttgagtttaagaatggttcgataacaacctagctttcattaggtttagtaaccaataattcctgagaataccatgttcctagctctttatttcatcgtttacaaccaatcaatcttctatttcattacttggtttacttttatcttcttataatctcttctagattagtctcgacattcaactcattgtatgaacaaaagaattttgtgaaaatcgatccttaaatactgcaattgatctcttatttgagagagtag

SEQ ID NO: 50584 - DNA, 577 bp, Arabidopsis thaliana
cagatgtaatgttctgttgctgtatcttattgatatatatcggtctattttttgttctcagggcagatgtcattaggtttatagattaatctgatctacccatttgtgggtattaatacacataatgcgggtgacataatagttaattaacttttgttagcgttttgaaattaaaaacaccgttcacctgaagagatattaatttttagcgatgatggagggataattatatttgatctggcacaagttttactgatgaaggatgtaacttgtgccaggggtattttgcattacggtaataattattacttacagataaccagcgatccgttattggcaatattgtctgagtagtgagtagtgttctgcctgaatacggtaacggtaaactgaacgcctcgtgacgcaatactggatactggtgaacaagatgtggcagttgaccagccagatgaggtatgtgcggcaggattcacgcgaaatgttaacctctgtggcttgctagtcggttgaaaattcatagtcctgatgcgcgtcaatccactggctttaaagcacactggcggaagttactaga

SEQ ID NO: 50585 - DNA, 500 bp, Arabidopsis thaliana columbia
ttttatgctccacaatttattattgatgcgctacattaccaagtactacaagcttcaacttataaaaaaagaagaagattagaaccatatgggcttaaacgtaggccagaactaaattcaaggcccaacagtttgttcgtaactcatacacacgaaatgtcccaaaccagaataaaattagggaattaacgaaacaaaaaagacaaagaaacctagttcagaactaaatccctagatcatagcagtcgttcttgtcaatttataactgatataggaataagaaagagggttaaatggacacgtggagggtggagattagaagttggtttaatggctgagattgtttggatgctaacagaagagaaaagaagcgttaaaaggaagcgaagaggaaaaataatcattcatgagatttgtgttgaattgttatcttcttcttcttcatttgtcctctgtttctctgagagttctatttgaattctcatagctatttcttcatt

SEQ ID NO: 50586 - DNA, 874 bp, Arabidopsis thaliana
ctctttcaccaggaacacaggttttgtctgttgcgggtcgacccggttcggagtttacgggttggattttgggtggggtagaccggagaaagtggtggttgtgtcaattgaccaaggtgaagcgatttcttttgcggagagtagagatgggagtggtggtgtagagcttggcttctccctcaagaaacatgaaatggatgttcttgttgatttgcttcacaagggactagaaaattaaatcatttttttctttcttcagaagagtaaaataatataagaaataaaatttattgtggaaaattgtagctttctattgtcaaataaatctagtttagagttccagcttcaccaggaaactcaatctttgaaccacatataacctcactatgcgttaaattggatcttaagttaaacttatatttctcaagaatacgatatgtagtattgcttttagaagtgtcaattgggctgtccaaagcccattggtcatgtccacttggatcatttttttcatgggttttattggttggtctttaatggacaatggtttgaaaatttgtccaagaccattaaagaccattgtccaatggtcagcccatggtcagcccatggccagcccatacaatgatgtttatatacaatgatgtttatatacaatgcattttcacacaatctcgttaaaagctctatttataaaaccataacatcaacatgaaatcaaaccaaaatctgtcatccaaattgcaaccttagatcggataccatcacaacctataacaatctgtcaaagacatacatcatcaaatcagccatgtactgagaataataaacacataaccataggctcagagcttaagagaacagcatgtacctg

SEQ ID NO: 50587 - DNA, 583 bp, Arabidopsis thaliana
ctcaactcagctttttcagacctgcttaaagcaactttgagggtggaccaacgtaagaatcgcaaacccttgcttttactcctcccaagtcatgttttccaagagagatgacatgtttcgtattcctggatctggaggccacatcatcggatcttgggatctccacagacacaagcaaaagaatcagaggttgcggctccaaaaccgaccaagacccaacgcgagcttctggaatcttgcttgacgagcgtattcttgctggagtcacaaccaaccaatgaaaccttcttggttaagtggtacaagaagacctctcgaaagatcatgaaaacaaaaggtgtaatggtgttcaagctagaccataaaggaaacgctatttacactcaagacatttgagaactcttcatttacctctcacaatctgattgttattggacaatgacaaaaaaatttaaacttttacccaaactcttaacttcaaaattttcaaaatcaattcataaagtattggtaagagcctttgctaataacttctcattgtggatgctctaatgtgcaagtgcatatgacatctaattatttt

SEQ ID NO: 50588 - DNA, 564 bp, Arabidopsis thaliana
gttctctagaagagcttcgacccacccttctatctttctaggtataagcctgaagactctgattgatagaagtatctttagagagtgatctgttaggagtgggatctctcatctctctaggggcagcaaagttatctttaggagtataataatttctgaccagacctttagaatccccaactgtcactggaggctcgatttttgtagagacctccttctcttttactaatcctgggcagaatttcttttcatgggtgagtctcaatgagtgagagcagtaattcttgagattcttgtactctagtgtaattagagcctcgctgccatcacggaagtcaaccatagtgtcgagaatgaggggcttcagcccatcaatagaaacctttatcttggctgctgagttggtaattttgatatctagaatttctttcagctctgagccaatagctttgagcatatatcatgttgccagtagtgttttgggagaccttgaatgtcaatccagaaagggatcattgaaggaaaagagtcaaagattatgggttcccatttttggagaatgac

SEQ ID NO: 50589 - DNA, 791 bp, Arabidopsis thaliana
atatgaaaacatagattcttaaaagaataacatatgaaaacatagattcttaagtggtccgcaaatgtgaagaacattaagaagaacaaaaatgaataaaaacatagattcttaagtttcttcgcaaatgtgaagaacaataagaagaacagaaatgaaatcagtacttatgaaacacatatgatgacatagaccaacgatactcattgaggttctgatggtccgaccaacactcaccgtaatcctcaaactcccaggaatttttgtatgttccttgatgacgtggaccaacctcgttaatatggaacattagcttatctccgaataagtcgacttcactaaatttatagcacattcgcttgtactcagtataaaattcccacggaattgatccatcgcaactatggagcatgatgtaaagtagaccagcatgtgaaaaaacatcttttatgccatccaaaatatcaatcacttcctggagctcacacatatgaaataccaacactaaactctaaagatatagggcatagggatttttgaaggcgaggcatttggtgtaaaacatgtggtaactagaaaattcttgagccatatgaatgaaaacaggggacttatctagtcgaacagaagacagagtttcccttgaaaaaacagcggctttgctgcctccggtccctgattttcagatggctgacacgtagctgctaatatactaatcgtagtttttgaggacggtgtagaaatgttaaaggcttggattcaatcatgactaaaacattacctggggtacg

SEQ ID NO: 50590 - DNA, 547 bp, Arabidopsis thaliana columbia
tgcaaactttaattttattaagtggtatagctgcatccttacgaaggattgcctagttagggatcaagccattcatagttcgagttctaatggagaggtcggattaccgagctcgtgtttttttttttttttttttttttttttgcatagacgagtgtttcgaaaatctatgcaaaaaaatacagataatgcatgtatatgattgagtgatgtttgttagattataatcgataacacttatctcagcggtttggagatggagatgatgacatcaacgatatggacgatctgaatatccgaaattgtaaacgtcgatggatgaaaatctacatttgagatgttcgttagagaagatctcatctttgcgtagaaagagaaaagcaatgatgaaagctagtgatataagcgaaaatgtcaatcaagcttaactaatatgtaagaaagtaattgaacttatcttttatgtgggaggtcgtcgagacggagacagaattggagatcgcatcattgatgaatgagtggaagccttgagcgattgctagtgatg

SEQ ID NO: 50591 - DNA, 313 bp, Arabidopsis thaliana columbia
taaaaacagttcgagtggcatggctttaaaagcatcttcaagtgaaatgcaaagccctgaaacaagaaggagctttcgttgtaatcacagggagactggtattggttctaagcagcctgagcttggtagatttcagaaaacagggatttctcggagttccaatagatttggtatggaatatcgaaagagaaatcggtttggagagtgtaatacatacagattgcagcggtggagtagtccgcatcataggaagcaattcagatggtgtatggaactggagacaggaccagcaaaagaagagcagcccgaccaa

SEQ ID NO: 50592 - DNA, 654 bp, Arabidopsis thaliana columbia
taaaaacagttcgagtggcatggctttaaaagcatcttcaagtgcaaacaaattgtcagatttctgatcatgtatagacgaaaaggcattgtcccagctagacaaagaactaaaatagtcccaaaggaaacaatgtaagagcttcacacgaaccatctttgcaagcacaaacccattggctcgcatggctcctgatttgctagcacgcgcatccaaatccacattcgtttgacctctctgaatgtcattcaatattggaattagctcgttgcttttcctctttgataagttctggccacggagtcccagttcaaaagacctaatcctatcatgaatttcaccaactatgtctcgagtcaaactttgaacagatggatgaaaaactaccacagagctacgattgcgaccacaattagtaacatttgggacactaatgttcatgcaattgcagagtccttcttcttgaagcctatttagaattctgtcaatggttttcctatcactttggagccctgtcctctcaagactgagaagccatttatgtagctcgctcttacaacaacttctcatctatgccagccagaaagagaaccaatatcagttggagggaaaagagaaataatatggcatcatgcgagaaagagacagtagtca

SEQ ID NO: 50593 - DNA, 1825 bp, Arabidopsis thaliana columbia
catagtaactgggacataaacccctcaattcgaagaaggttgctggaaactccaagtgtttaaaattctcggatttgtaagtacaaaactcttactgctatatgtgtatccactataagagaacctttactgattcagacaccatatgcttctgttactgattggtgtttgctgtgcagattcctataaaagcacctgatagcgcccgcggtgaacttgagattacctatgtggacgaggaactacggttagtagtgaatgatagttttcattttcatgttttatcaacaaaatatccaaaacgtttgaatattgaaacaatgttgtttttttgcaggttatcaagaggtgacaaagggaacttgtttatattgaagatgtttgatcccacttatcgaatccctctttgatctaccaaacaaatggtaccgagccatccatcatacatacttgctacaacttgctatgtctctcttcatcatgtatgtaatctaacataagaaaaattaataagagggaaaaaatgagacgagcttctgtcattgtttcaacttgttcaaatcaaagattctgaatcttgatttggttgagcagttagttccaatcctaaactatgtgatgctcaagcagtacaacaagaagaccttgaagctcctcaaaaatgcttagatcattttctctctatatctcatatttttctttcatctttcattcatgtctcatgtctggttccatgacctttctacattgtttctgttgatttatgaatcttcaataacactacaagttaaaccaattagaagtgagttggttatggtccggtacaaagatcacaaccggagaaggattgaagagtggtcaaagcgatggtcagagttggttggttccgtcgaaacaggaagaaaggtagagcctttttgacaatttgaagaaaatagcaaagatctacttttccacatacgttttcgacgccgtaatgagtcagaaacaactagggcctctcgttttagaagaaaagagagcaaaaaaaccttatctttgtgactttcggtggtgtgtgtgatgttgttgtcggtcatggcgaagacagagctacgatctctctctttttcctctcttatgtgtctatcttcgaacagagtctctcagaaacgacccagccactctttaaaactccattggaaaagctttgtcctgttttgatatccatggctttaccttggtgcttaaagactggagttttaacgtctccggccgccggatttaatcatccatcggacagtggcttcgccgttccgacgaagttactgagtattcgaaaaggtgatcgggaaagattgagaatccaagctgttttcagctttcctccaagaaacggtggagccgagaagcggaaacagctcaaacatgaacttgtcgaagccattgagcctcttgaacgtggtgccactgcctcgcctgatgatcagcttctgattgatcaggttctttctctttcttgtgggaaccattagggtcttgagaatagtcttggtacactagggtctagagaatgtgattgagagactaatgctgagtgactcttgtctgtatggagccagttagcgcgtaaagtggaagcagttaatcccaccaaggagcctttgaagtctgatttggtcaatggaaaatgggagctcatttatacaacctctgcttcgattttgcaggcaaaggttagggcttgtgttgttgttgtgttgtctaagtttgtgttcttttgccttgttgtgtcattctcttttatctcttgaacaatgcaacagaaaccaaggttcttaagatg

SEQ ID NO: 50594 - DNA, 419 bp, Arabidopsis thaliana columbia
atcgcaacaaaaacttaaatttcttagatcaacaactcaacaaactcagaattagtgttaaacttaaagaatgtatatgggcgatattatttcggtttgtcaaaataatacagctactagtaaccaaaattggtctactgatcaaaatatttcagatgcatgttgtcatttttttcattatgttgttatttactgaacaatttcatctctactagagtgaattatttataaatatatcgggttaatcatattatatcgcaataattttataatttatgtgataaactcatatttatcatggcaacacattgttatatcatataaaaaataacgacttacatatagtatagtatttgggtggataactatttaattaagatgttaactagtatattatcgcaataaatttatatataaaa

SEQ ID NO: 50595 - DNA, 454 bp, Arabidopsis thaliana columbia
attccatgaaggtccaaggccaagacacggtggtgagtataagtctcggtagtggtttccatttcgacacaattgtgcagtgagacgacgacagagctggtgtgcgtggttcaaaatatgactgacatcatactatgcgtagatatgtctaactggtttaacacgatagtatgcacttaacaaaggatacataaatttattgcgacaatatactagttcacagcacaactatatagtgatccacagcaactactatactatatgtaaatcgttatctttaatatgatatggcaatgtggtgccatgataaatatgagttcatcacataaattataaaattattgcgacataatatgagtaacccgagatatttataaatggatcactctagtagagatgatattgttcagtgaatgacggcactgtgaagtaactgtcggaatgcatctgagat

SEQ ID NO: 50596 - DNA, 607 bp, Arabidopsis thaliana
tagtaacgaccgccagtgtgctctaaagctgaagattgccacacaaagcgtcatcaaacttttctggcgaccaaaaggtttagcgtatcccttaggcgaggctccggcgaaactgcgttgcacttcgtcagctgacatggttacggtcagtaacccaacaccttatttcattaccctgacagacctgaaaataggtggaaaagtagttaaaaatcaaatgatttccccctttgataaataccaattttctctgccaaagggggccaaaaatagcagcgtaacgtatcgaaccatcaatgactacggggcggaaacgcgcaactcaactgtaaatcgtaagccgtcttcagttaagagagcgagatgtatagaactcatcgacaacacagcctgttaagctctggtggagtgccatcgtttattggtgggctggtggtgtttgtgtcggcagcgttcaatgcacaagctgaaacctggttcgatcctgctttttcaaagatgatcctcaatggtggcgatttgtccgttcgaaaaaggcaaaaaatacgccaggggtttatcgtgcgatattgtctgaacagcaattgtgataccgcacgcaattttg

SEQ ID NO: 50597 - DNA, 509 bp, Arabidopsis thaliana columbia
gaggatcgatccccttccattttccagtgttcctctgtatagctgcaaaggatcaaaacaagcagagtaaagcaaatgacagataggcagatcacaagaattaatcttgcagaagacaaaccatacctttccaagggagccttcacctaagaaacgtgatgaatcaaaatcgtctgtggcttcctttaaatcttcaaaagaaaaggaccggcatgagggcacaccctgtgcacctagctttgctgtttgagagattaaccctgcaagacgaaatcatacaaggatattaaatccctgaaagacaattcctagcaggaatagtctacattttgagtcaaaagttactcacttgcactagcaagaacttcagaggagagactggtgtgtgagttatctgtcacaaccttaagccgagtttgcggcactgacttttctcttgaacaacagctagagcagcggtttgtgcataacaggaggaggatactaatacaaaaacacaagacaagaac

SEQ ID NO: 50598 - DNA, 369 bp, Arabidopsis thaliana columbia
ggtcgtttgtaaaactaacatattttgataaagtatttaagaagatagcagtataatatggtaaactaaatacatagcacacatgagagatgaaatgtctaaatactccttcatgtttgtatcagtgtgtagacacacgggcgtgagattgtaagctgatgatttcatgtgttatagagagtggagagaaatgagagtttgtgagtttggtaagcacacaagacgagacccaaggtggcataaggagaggtgatggtggtgtgggcaacgacgaccgtgatagtgtgagcaacgacggtggttatattgactgcagtggtggtcgtcgcggtggtggccgtgctctgattcgacaccatattgcagcac

SEQ ID NO: 50599 - DNA, 616 bp, Arabidopsis thaliana columbia
tctctcaagcagcaaagctaggtgcacaaggtgtgccctcattccggtcattttcttttgaagagttaaaggaagccacagacgatttcgattcatcacgtttcttagctttggaattatgcaggaaaatggctaaaacagagggcgatgtgtacaactttggattcatacttctggaatctctgataggaccagtacctactacaaaaaggagaggcctatcttctcaacgaaatggtatcatatagggtaaagaaaagaagcaaatcttcatcattgttaatagctgttgctgcaatgttgtatttgcagacgtcatttgggagccaagactgtcgacagaaaataggaagtccaacggtcctaacaacaagctcgcaggagtctttacccaattgccatctcaatcgccaataaatgtgttttgcttgaaccttctgcaagacttcctttaaagatgttctctggaacttaccatatgcagctcaaatgcagtctgccgcagacgctgaacgcaaatctgataagtcgtcgtgaatccaaaggctaacctgatgattgatagttgttttcggatttataaatgttatgctttataagtttggtttttcagtag

SEQ ID NO: 50600 - DNA, 461 bp, Arabidopsis thaliana columbia
taaattcgaactgaaatttaattttgtttaattgtaaaatttaaattaatttataaattcatatataaactaatatataactcgatttaatgacatatcagactctctaattataatgaatttactcttttggagatggtatcgtttaaggtctcttgtaaaactaacatattttgatacagtatttcagagtatagcagtataagatggtagactaaataaattactcacatggtgagcagggaaggtctcaatactccatcatgtgtgattcagtgtgtagacacacgtgcgtgagattgtcagccgatgatttcatgtgttatagagagtcgagataaatgtgagtctgtgagtttggtatcactctagactgagaaaaatggtgcgataaggagagatgatggttgtatttgcaacgacgacggtgatggtgtgagcaacgacggtggtgatattga

SEQ ID NO: 50601 - DNA, 508 bp, Arabidopsis thaliana columbia
tcccctagctaattcaaatatgtggtttcagagtatacaataacaagatgtaacaatcttctacatcaaatcttgcgaattgaaaaaaaaaaaaaaaaaaaaatcttgcaaatcgtaccaagactttgtttactcttcaacattcatatcttagtttgtcaaaaactgactaataagttttcatgttttgggcacttgccactataccttttgtttcttttcggaagtagcccacaaacttacaaggtttgcagcaaagacctctctcctactcattatgaccgtactatgatcagtcccagcgataacctcgacttcaaccgcagggaactttcctttcatgttcgatagacaatcaataggaacaacaacatctttatccccttgcatcacattgattttaacaccggattttatcaaagtttcaaggtgtttatccgtgaatttcgctccgccgcatattacattgtgcatgctatgccacctgattgatgtgtgtgctttgtaa

SEQ ID NO: 50602 - DNA, 647 bp, Arabidopsis thaliana columbia
cttcttaaaaatgtaggatttataaattctatacaaatctctcataagacttcttaaatgttgaacacaaatccttgatggtaactaaatttattaaggggacgaaaaaaaacacatctcagttttgtctcagaaaaatgaaaaaaaaatacaaatgcaggctgtggggttcgaacccacgcgcacttatgtgcagaagaacttaagtcttcccccttaacctctcgggcaaacctgccttgatgtcactcatatgaaatataaccttcttaataaacgtttgtatcttcctcttatcattatgtttggagacctctcataactataatatatttgtgtcgagattgtgatttctttgttggtttgcttaatatatgcaacctaaccacacattcacaaattccatgtaatattgatagataagcttcatagataacacacgtgttttcctccatatgttcctctgtctttctcatatccacacaacaatcgctctaaggaacagtgacacaaacacattcacaagaaggaagcaaacacatattcacttatatcaaagaccagaatctgcagtgcaatgatattcccttgatttattttcccagtttcagaggttttacataaactctgtcaaatagagtaatctg

SEQ ID NO: 50603 - DNA, 768 bp, Arabidopsis thaliana columbia
gcatctttctctttattttttgaaattttcaatgcatgaagtttttaggaaaaaagattttaggaaaaatatgcaggctgtggggttcgaacccacgcgcacttatgtgcagaagaacttaagtcttcccccttaaccactcgggcaaacctgccttcttgtctattgactactgagagaacaatcacaattctcaaacaggaacaagtatgttttggtaacaagttttattattgctttgcaatgtgaatcgaataaaaagacaaagtaacagtgtaatacaattaagttcccattcaacatatcatttcttggaacgttttaagtaaacaaataaacctatgctcgttaggacaatagcaccagccaagacgccagtctgccaccaaacacaaccgccatttccctcggacaaatctgcaatcgtctcaagaggagcaattgtctcggtaaaatcaagatgtagtcgcaaaaccttttgccccaaagacctagcacaagttacagcagcaacaagatcactgtccctactaatcaaaactttatcaccttcatcatcttggtacattatctgaaggcctgaatccgcttcacatctttgcatcacaacactcatcagctcttcaaaactctcaccagttgagttaaaccgctgtactctccctgtacgatcttcgaatttgaaagcacacgagctcacaagtccttgtgatggacacgactgcttcgcttctgaatttatcagcattgctgacatatcgctgtgtg

SEQ ID NO: 50604 - DNA, 599 bp, Arabidopsis thaliana
gaaatatctcattgatttagttcaatgatgatttggtgtgcaagggtcatattccaccgcgtcgagaagaagaaaaaaagttggaaatgatattcgaggtacttcagaagaaaggtttatgcttcaatattcctatatgatcatgttaaagaagatgaatcctgttacaattttatatgttggaagttgatgagaaactatagtttaagtaattgttctttgtattggagtttccattaaaggcttccgagtcattaaaaagtgatcattatggattgaatccaccttaagattgcatatggtggaatgctaattattactacttatatattcctatttttactgtttttagctatgttttcgatataggtttttgagtttttttgttatttatatagttcttatagagtcttttcacgtattctatggagagggacaataatgtaaatatgaaaacattttggagcaaaacctgaagaaattaagccaaaagacgaattcactttcagatcaagtcgagagtgtcgatcgacaccagtttcggccaggaaaagtccatgacaccagttgaagatatgaaaatttgccccagaagacga

SEQ ID NO: 50605 - DNA, 508 bp, Arabidopsis thaliana
tttcctgtctcttggttcgcgggtcgtacaatgtcggaaaattgctcacgaagttggtcgtttgcaagtggtgtcagtctgaattgtcttggaaaaacgatcataactctcaaaccataacctcaaatcgtgatccgcttttttctgtggcttcgtgtgactgttgctgattattccagaaaatatcgtaattttccgagttgttttgttgctccattggcgatcagaattcatgacgacgaaagcaaaggttactttgtgctgcttcagaacttttaacgaaggagggagacatgcgatgctgctcaagttgagatctggaattttagagtctttgtaaacttctttggagctctccacattgttgacttgtcttgtagaaaaagcttattattttttttttttggtgctacgagattctgttcttgacgggtgttgctatctcgaactcaaaatgttagctgttgacaagttgagctaggaaagctgctaggcgacttgttgaaga

SEQ ID NO: 50606 - DNA, 571 bp, Arabidopsis thaliana columbia
tggccaaggcatgaggcccaaaagtacacgatacaaaattacatactttaagttttacaaaaggacactgaaaaactactccgggttccctagtgttcaccattccctctaatcccctctaaggttacctgcaaaacaagtagagtcatgagtaatctagcattactcaatgagctcgggtttcccaaggaaacgttagtctaatccccacccataatcccacatgcataacataaataatcagagtacacaaagaaggaagtaagcaacacacaacacaacaaggagataacgtttcttaaagttttaattagggcccgaatgcactgccttcctcaacatatcgtgaacacccgagttataaccacaaaggcatataaccggaacatcaccttggctacactgtcgtgtaagcgacaccgggccttgggtacctaacccagtctctctgggtccttcgaaccccttgaggtcacttgcatctcgtcaagcactccccacgaaagaacggactcacatggcaaggtcagatacatcccacttgaccgtagcatgcttatggagttaattg

SEQ ID NO: 50607 - DNA, 443 bp, Arabidopsis thaliana columbia
ctgcaatctctgctgcatgagctgcattagctgcatgagctgcctcatatgcttgaaatgcctgagctggttgagctaccacaggtgggtggtcttgtccaacaactggtgcattcgctactcggtttacccgagcgttcgcaggacgtcctgatcttcttggcggcattttctgtttacacaagactaaacattaggacccttataataaccgaaaatttacactactactttaaaattaagtctagcacatttggtgtttttttttttttttttttaaacccctttcccaatttcaatactgaaaaccctttctttttaaaacgctttctaaaactataaattccaggaaaactttttttcataaaaataaatttagataaagttagtctcccgggtcaacacatgcttgactttaaacctccgctctgataccagttata

SEQ ID NO: 50608 - DNA, 596 bp, Arabidopsis thaliana columbia
tggaatttgatgtaggtcaaattgctctaagtttactccctcaaataagagatcgtcgttagtacttaagggtaaaattccacaaaactcttttgttcacacaataggctaaagtatcaaaatcaagctagatagatgataagaaaataaaaagaaagcaagtaagtagatagtggattgtgaagttgtaagacaagataataaaaacgttaggtttagggtattctcaggaaatagatgataagagatatagaaatagctaggatgttatcgaatcgttcttaaactcaaaccctaattacagaataagcggtggttcgccgtgctactcaatatgcctagggctaaagattcccagcggtcgcttggcaaatccctatattaagacatgcatgataaacgagtttgataagttcacctaaatagataggccgattcttatttcacatctataaacttggctcatcaaatagtatttgtggtaacatatacctttttgggcatccgattatttaagattaagttctaattagttactctagaactagcattaagaataccaaagatgaaaaatccgtcatatatcctagcaggtg

SEQ ID NO: 50609 - DNA, 1002 bp, Arabidopsis thaliana columbia
tgatctgtttcttttttgtttttcgccaaccatatatgatctgtttattatcaataaaatttcacttcagagatggaaaaaaaggaagtaacgatcccatgccaaaagaaaaaaaaaaaaagaaaaaaaaaaaaagaaaagaaaagaaaaggcgatgcattaccaacttttttaatattgatcctcaccatcgaaacctcattatgcgtctcgccggagctcgccggagctcgccggaatatactttttgactcccagtcattatgcgtggatcttttacatgaatctgaaatagaaagatggtgagaaagttgagatttgttgtatgatcatttaatggtgtcaggatgcagtctcttaaacaattaacacaccgattttcttttttagtcttcctaattcaattttccagattttgtttttacttttctttaatttttaacttaagtatgaaattggtaatttttcaatttaattaaacttaatttttaattcaatttttctgttactcaggtaactaatttcttatgcactaaaatcacctaactagcttgaaacacaaaataatttagagttaagagtttggagagagaatgggcaataggttgtgatttataccacgtttcaaggacgtgaatctgaaacctatccaagatttcatcgagccagaaaaaggtagtaagagaaaaaataaacaagaaaaagagtagagaatattttaatatattgaacataaaaactatacctcgacgaaatacaatcctaattgagaaccaaaaaagccaacgacctctcaaatccaagaacggggcttttgtcttcaaaatgaaaagtttgcagagaaaaagggggagagggagagagtctcagacaataccatattaacaccaaagaacgagtttttggaagcaaaagagaccaaccacacttactactgtcagggccaaaatcaaaacccttacctggaaaagatatatatccattttagttaacgatatcctc

SEQ ID NO: 50610 - DNA, 450 bp, Arabidopsis thaliana columbia
tatctatatatatatttttgtagttattttaacaaataaatcttagagttggacttatttacaacccaatgccattagcattaaatatttttttcaaaataattaattttactttaaattcttaatttaaattgtcaatcacattatcaatcaaatttaatccaaacaaacttcacatcaatcccttaaaattagcataaacgtatttgttaacaatattttaaaacaaagttttttgtttaaataaatattattcttactaaacgttttttgtttaaataaataaattctgtatttgaacttatttacaatgtcatgctactggcattaattatttagaaatgaaaatatttaattaacgatttaaatcttctaaatctttgcttttagagttattatgtcattacctaaaagggaaaaaatatatttttttaaatattattatttata

SEQ ID NO: 50611 - DNA, 555 bp, Arabidopsis thaliana columbia
  unsure (1)..(555): unsure at all n locations
tttgaatagttggatttcctgcttgacagacgtcggagagcaggagcaggcgctttagatctggacttggcagatgcagccgtacactgtctcttgcgctgagtcggagcagagaccttggactttgttttcttagacatgcagatgcctggttcagtctttggaatgaacattggagcaaccggaggcggtggagggtctgaaggagttgcagaggaaggctgaccagcactagagactccagtcaacgaggtcgcttcttgattcatggtgacttgtgtttttagagaaagaaaccctttgaattttgaggtttgagaagcagagaaggagaatgagccttctgtgagagctgctaggtttaaaaggcacgagcgcatcaagggaaaccctaaaaacagcacagaaaccaagacaggctgcaaaacactaaaccagatccgttaaacaatcgacagggcacttataccaggcccaaaaacaattcacaacagaaacccagagacgtagtagacagccaacatatgtacataatatgattngcacataaagaag

SEQ ID NO: 50612 - DNA, 528 bp, Arabidopsis thaliana
cagtgaaaccaacacagctcaaatactcaaaaacttacatgtgagataactgaaaaaggtaacagaataacttaccaattggtcttggatttcctgaaaagattttggcccagagaagtggatgtgaggaccgagaccgttatggtcagagagacgagctttggaataggtctgactccatttttgtgcttgttcggtgtcacagtaagcgcacataacagcccacagagtttcaccaatccatggaggctgctctctagttctccttgtggtgctaaccatgtctttcaagcgccgtttacagacctgattgaagtggtactgcacaatccctgttattaagggatcccaactgtgagttttctacaaaaaattgtagcttgagttagtgaaattcaaaagattaagctggaaagttaagaaagtaagagagatgcatgacagcttaccgcaaactcaagaaataacctctctcttttatccagtggcacacatgaccagttatagtagggagcattaaatttttgt

SEQ ID NO: 50613 - DNA, 783 bp, Arabidopsis thaliana columbia
gttgagttaggtcaaacattcaaacgagattgtgccaaataatgaaatacctaaaggcaagtactaggtggcgttccagacatacaagcattaagaataaactcaactagaagaaatagtgtaaacgatcaaacaaagccatagaaaccgccaacctagatctttgatctattggtccccatgaatttccctttgaaacccccctcaaacccaactagagatctagtcgctcatggcaaaggagctaatccaaagttgggttgagtaaaccataactaaaagatgaattaaacttaaaaggggtttagagattacttctttgaatgtagaatacaagaggcaaagctccaccttaaagagtcttacacgaaaacgagaaagagaaagagagagatggtgtttttcaagcttcaagaggtgcgacggctaagaggcagctcttggtgacggctagggttcgctggtgataaaggcacatttagggttagggctaaggacaagtatttatacttgaggcccaagaattaggtttaggggtaagaacgtcattccgccggataagtaagtgatcgggccgagtagtgggcttcaggaaaggagcctaatggcggtggcgcaaaaagggaaagacttgggaatgacctaatggtcggtggtgagcactcggagctgcccgagttcaagtctcatcggccggatgtgttttggactttttatttccaaacagccggttcttgacatgtcttcactcttcgggcgatatcttctgaacggcttcatgga

SEQ ID NO: 50614 - DNA, 586 bp, Arabidopsis thaliana columbia
gttgaacaggttgtctagggatagcctgattgcggttgttaaccattcgaataggctaggataccactctattcgattatcccatccttaggaatttctcgtctatctgatttctctgttttatcgttatcgcttaatcgttctcattgcttgtttcttagtttttgcaattactcgaccaacttactggaccacacccagtgtttggcaacagactgtgcagtcgagtacagttgtctcattactcgacctcttactcgaccacatcctgcttctgacatcagcatgttgtggtcgagtgattttagtaattctgttaaagtttttgttttctgcatattcgcttgggactgttagaaacaccaaaactgttattgcttggcttgacttagtgacttctgatcacatctcatctgtttgcatcatacctgattggaatgacacctaaaatactacaacgacaagatagtgttttaggattaattgatcttaataacctattatcaaacacggtcacaaagaaatcagaatctcctattcaacgatatcatcgaccgtattgctcgcaactcagaacacagacaga

SEQ ID NO: 50615 - DNA, 572 bp, Arabidopsis thaliana
gtgctttactccatgcttcttcagaaggttttcaaaacccttgttgatgaaatgctctccaccattacttattactaccctgggaactccaaatctcgggaagattatggtcttgaacagttttagcataacttttgcatcgttggtaggactggcaatagcttcgacccacttagatacataatctacggcgaccaatatatatttgttaccgtatgaaaataggaatggacccataaaatcaattcctcatacatcaaagatctcaacttccaagattgggttctgaggcatctcatttcttctgctgatgttgccctttctctggcatgaatcacattttgaaacaaactcctcaacatccttaaacattggtggccaccagaagcctgcttgtagaatctttgacactgtcttgaatgttgcaaagtggccaccatatgcagagccatggcaatgcagcaaaataccttctacttcatcttctgggacgcatctcctgtagatcttatctttacaaagagtgtagaaataaggttcatcccaatagtaatggtgtatgtcctgaaaac

SEQ ID NO: 50616 - DNA, 559 bp, Arabidopsis thaliana columbia
gttctttattatatggctgctattagtacacagagttgaactttagaatactaaaaatctcgacatcttttattttatttttgtcaagcatcgacatcttttctgttcaagaaaacgaccgcaatagtcgaataatataactcttggactagttaatatatatttgcgatagattttcgatctcacttatatcttataaccaagagacaaaaacaatattgcagtcaagtacaaaacgaaaacaatcacaatgtcgactatagatgagtcggtcattcgatccaacggctctgagtccacgaaacacgcaaccaagtggtgctctcttttacaccaaatcatattataaaaaacttaaaagaaagagaggatggttcgttggctccttcttgttccttaattaattcaaattatattcatcacctccattgaataagtccatttcacgacaaagtcaccaatgcttcttttacatgtatatatacttctttccactccctcttctctactcaaatcaaatcttcttccttctctgttttcttaagctttttgaaaattt

SEQ ID NO: 50617 - DNA, 552 bp, Arabidopsis thaliana columbia
ctgtcggtagatatagggctatcgagtatacaacttcctggattaggcatcattgcattgattattgtagagataggcacttccagcttgtctttcatcttcaatggagcatcatacatcagaagtgcaatgatttcggcgttaacaagctcgcgtccttaacactgatacctttctatatcatctccaagatataatcataaagtacatactccaggttcataaagtcaacataaggtaactctgatagaagcagtctacacagcgtgaaacatctataacatctagcttcaaggataagctgctcggccattacaaccattggaatctcaacataatatggcgtagtccttgtccattgttcacatacgctatcatctgatgctgacgcttaggtgccgagctctctcgatttctctccgtcaaacgctgaatcatagtctgttcctgaagagtgtccatcgacatcgaggtcgtgtcgatcgacattgagatttgatatcaatggttctacaaattagtgtggcaagtgatatgtttataatttgcatg

SEQ ID NO: 50618 - DNA, 704 bp, Arabidopsis thaliana
tcaagtctttcacgtacttgtgctcgtcaggtattagcgcgagacagtccactaaaggcatatcctttatgtgtttttccaggagggctctgtattttgcaaccagaactttcttgaaacgaccagggaatggaagcagaggtttgtaaggcagtggcacgaagactgtgtctttggtctttgtagcttccagtttttcaacaaagggagtagctaggggagcttgtggtcgagtgggttgactggtgagtatgggctcttcgattaggttgtcagccaacacatcatcttgataaaaatcctccccctctagaattacactttcctcagtgtttgatgtagggacatatcgagttggcagctcgcgatcatgtgtgatagtgatggcatgggcagtggcatactcctttggattctggattgctttccttggaagctggcatgggttgttgttaacagatggtgaagcgaggatgccttccacatatctcatcctagtgctcattgattcgaacttgctgttaagtttgatgccttatcggtcgactttgttgtttacttcagacagcttcttagcgatttccattgctcctgtggcttgtccttgaatgagctggtagagcacagtcattatgtctgaattctgaggcgcaggtgcttgttgttgatgtggtgtgaaccaggtggtggttgttgttgttgat

SEQ ID NO: 50619 - DNA, 618 bp, Arabidopsis thaliana columbia
ggtactcatctcctccacctacacctcctgatttcatctgtaagacttttaaattttccaagactgtttcacggttaagcaagccacgagtttctcgtcgagtgcttgtttcttcttttgatgattgtgaaggaaagaggagtataccacccatacctaagtgtcaccctactgatgttcctcatttccatggtcgatctcaagcgctaaatgctcctataccaccatggatgatgcgatgttcttctaagaagcatttactgccaccttctgatccacctgatgcttgaatcccagcaaagtcaagctattgactataaataagcgctaagtgggaggcaacccactggtatgatttttttctttatctttttcctttatttacgttttttccgctaacttcagatttaaatgccactggggacagtgacgtttaagtctagggaaggtagttactaactacgtttttcttttgagtcttattcttcctcttatgttcttatttttgaatcgttttactgagtcaaaatctagttaggaataatgatctctattctttagtttattgccttgttgattaatgctgcagattcaactcaatttgactattgaaaagat

SEQ ID NO: 50620 - DNA, 854 bp, Arabidopsis thaliana
tagtaacgtccgccagtgtgctttaaaggatgtttgttacgccgagaaatttgcgcaagaaaaaggttttttatatcgtttaacatcacgatatcgccattatgccgcatttgagcgagcgactttcgagcagggtaaatcgacgaaacttatgatgctgaccgataagcaaatcgccgatttccagaagcattatcaaactgaacctgaacgttttcaaattcttcctcccggtatttatccggacagaaaatacagtgagcaaatcccaaacagccgtgaaatttatcgccagaaaaatggcataaaagagcaacaaaacttattactgcaggttggatcagattttggccgtaaaggtgtagatcgctcaattgaagctttggcatcgttaccggaatcattacgtcacaatacgcttttatttgttgttggtcaggataagccgcgaaaatttgaagcgctggcagaaaaactcggcgtgcggacaatgtgcatttcttctccggtcgcaatgatgtgtcagaattaatggcagccgctgatttattactgcatcccgcttatcaggaagccgcgggtatcgttcttctagaagcgatcactgctgggttacctgttttaacaacagcggtatgtgggtacgcgcattatattgcggatgcaattgtggaacggtcatcgctgaacctttctctcaggaacaattaaatgaagttttacgtaaagcgttaactcagtcgccattgcgaatggcctgggcggagaatgctcgccattatgccgatactcaggatttgtatagcttgccagaaaaagccgcggatatcattacaggtggtttagatggttga

SEQ ID NO: 50621 - DNA, 616 bp, Arabidopsis thaliana columbia
tcccctggagactataacaaaaactattataaaacgacttcaagtgagccaacacttagcattacaagcagaccaaacaaagactgcagttgtatcgactataggtgagccaaaacaaaacatttgtagaccaaaacttaacaaatacaagcagaccaaatcaactttaggtgagccaacacttaacaaatacaagcagaccaaacacagactctatcccaaaacttaacaaatacaagcagaccaaatcaactttagctgagccaagacttaacaaatacaagcataccaaacacagactctatccttaaacttaacaaatacaagcagaccaaatcaactttagctgagccaagacttaacaaatacaagcagaccaaatcgatgaatgtgtgagccaatacaaaataaagacattcagaccaaacaaagactgcagaccaatctatagatgtgtgagcaacacaaaacaaacacattcagaccaaacaaggactacacaccaagctaacactaaagccaaatcattgcactatagccaaatcactgcagaccaagccgacactaaacacagacatccataatcttcatctgtttgtagaaggagagacgagag

SEQ ID NO: 50622 - DNA, 601 bp, Arabidopsis thaliana
tccttctgctgcagccaccactgcggtcgagtgatctcctcgagtgaataagacgtgatcttctgctagagcgaaagagtgtagccttctttctcctcttgtgttccctggactcgaatgatgaatgtctaacagggacatgtgagactctctgctcactaggctcaggcctgtactgacctggcttaggctcatcaaatctcctcgatggcatgtccaaagctggatgtccctatggaatagctgtagtggaagaggagcagctcagcttatctgtcagaaacttgatagtcttgaagcacttggcgagtaacttatcatgtttcttgcaccacttctacagcttgctgttgttcatgtgagcttcactcaaactcttgctttccctcgctggaggtacatgctcactaaaatgatacatgctagtgtcaaactcgacttctctgtcttcacccatcccatcctcagtagcttcttctataagaatatcctcctccaatggttgagcgttttcgtagtagaggttctcaagctcagacctaaaatcaatgttatctcctctattatgcgtgtaactcaggactagggagaaggatgctga

SEQ ID NO: 50623 - DNA, 488 bp, Arabidopsis thaliana columbia
acatccccaacaactaccttgtgtttcatccaccgaaccgggattgacaagggggagatgatgagctgtcaagtgtctgagagatgtggtggcttgcttagcaaaacggcccacaaatagacattgaacaaattggattccgtacagatcatgaggattgctacgttaaaatggacccatcattttaaatgtaatttctttacgtttaatcattgaacttttagataagtttacaaatttacttgctttatataggaagatgtcataattctaactctataaatacagtagaagatattttagtgaatgtacgatttaagcatattatcatttgatattattcattaattatacttttttttgtcaaacattcattaattatacaaataacagattttcatgataatgatttttgtcgttgtcattaacatttactgatagatgtatttgactcaattattgatatatatgtctgtgatatactatat

SEQ ID NO: 50624 - DNA, 592 bp, Arabidopsis thaliana
ctgaaattgggaagggtttaagttctgtgcctgatttgttgttacgccatgaaaattagcttgctgataacttggaattggaccatagttttggtttggcatggacgcttctggttggtattgctggaccatgggctgagaaacaggatgatttgacgaaccctgagtgtacatggaataattattatgaggcatatttggtaacggagacagctgaggcatgttaacagattggctctggtattgcatgttgccatggaccattccactagtgtagttggggttgtttgaagctggagggtaacgcgaaggaggaggaggtagttgcccagctggagtgtactgatttccgtattgttggaatgactgatttgacgcatcatgaactgtttgtggacctcttttccaagcttgagacggtgcttctccattgtacagtccattggactgatgtgctgtggaaacaactgttgaaggtcctgacataggttggtgactctcaggggcagcaggttgagaagttgcagggagaatagatgccagagtggctaaaagctccggagttaaactaaccccagcttgagggctgcat

SEQ ID NO: 50625 - DNA, 768 bp, Arabidopsis thaliana columbia
tccacaaatactcgacctcgccacttcttatcctcaaacactcttctctcaaacactcgaccaacactcttcaccttatcctttcttctccgtcactcgacctcaccatctttcttccccacgcactcgaccgcttctcactcgcctcttcaccaccgtctctcatcactcgaccaaggtgccatcattctctcatctctcaaatccagccatcactcgttaacaccaccgtttcttctcttccgcgagttcaagttcactcgaccgcagctcgtctcaaacccactagctactcgatcgctgctccttcacaacttcatcgctctcaccaccatctctcaacatactcgaccttgcacagtcactcgatctcgccgcttctcaacgcctccccatcgtttccatcgccgctgctctcatccccacgaaagctcgtcatcgccgcttcactcgattaagcaaccaaactcgacgtctttcaaaccgcttaaccatctctcgcctctcacggtcactcgatcgccaagcacaaccaagggatcactcgaccacgtgttcacaaaaccgaataaaaaaaaaaaaaataaaaaaaaaattttttaagaatttttggtacactcgaccggtttactctattggtttgtgtttttagttttgttggaactaacgtattaacgtttatttttgagttacatttgtttcaaggtttcatcatgagtaactatagtggagaacatctatggacctgattacacgtggatgaactga

SEQ ID NO: 50626 - DNA, 840 bp, Arabidopsis thaliana columbia
tggatgagtataagatgtaaaaggtaggacgtaatcatgtgccatttttttgtttatgtataactgtgaaatcttaaaagcaaaatcaagtctgattatgtataagacgtaatcatgtgccataagtcaattttttattatgttcttcatactaatattttttttgttctcaggaacagaacgaattaggagatgaagtatccaggctacaatgtgagcttttataactgctgtagtataattacttacatcaggtacaatttccagcccaataatacagtcctttaattgaaattagaattactgtaatgtgatcaatattagtgatttgaatttaaaggtggtctaactttctgttgtaaccaaatagaaatagttatatagggtaacaataggcacttggattgtaagtagaacaaaacaatttggaagaatagaaaactttattaaggcacaaatcgcatgaaatagatgtccatgttaagagaacttattgtagaaatagaaaatttagaaaaacaaaaaccaaaaaaaaagggtctaacatgatgatcctaaattgggaaggagaatcaaagtgaagcactttgaatttatttgtaaaagatagtgagtgatcactccttcttctcaactttgaccctcacaaccacattcttctttttcatactgattgctgctcctcaaacttggatctccatccttaacgctaggatctccaagttgtgcgtgttctgaagtggggccgaattctgggtttgacttttccaagtcaataggtttaatgcatatcttcttagaggtggaagattcatcagcagtaccatccgggtttgcgta

SEQ ID NO: 50627 - DNA, 735 bp, Arabidopsis thaliana columbia
caaagtatgttgggttgattgaatctttctatccagaacgttttcttagtaatgtagcagaaatgtgtgtttacggagggatgcaatttttagttcatgatgttcagatgactattggtacttaggtttttatgtgtacatgtgaaataaacctaccctaagatttcattattatttcatgaaaatgagattcacgttgcatctatgtctttctgatgctgatgaatgatgatgattgttctgaggtcaaccaaattctcatgaaggatttatttagtccttctcgatattaattgtttcatatatgaataacaacaaggtgaaactgatcaacggtttaataaatcgaaagtcgaatggaatgaaatgctgaaggaaagtacaactacaaaactcatatgagtaagagagttgagtatatatactcaaaaatggcttttgacaaaaagttaaaaaaaaattactcacctaaacccaacagaatattacaacgaaaggaggttattatccacattattcccagacaaattctggtcagacatataagctagctagcagatgaacaccgccctagcaaattgggccgactctatgcgctactgatacttttccaaatgcggatattaaagcataagctggtctgctttagtagccgcccatcggtggcattccatatggtggcatgggaggcattcctggcataccgcccatttgtggtggaggacataccaccac

SEQ ID NO: 50628 - DNA, 729 bp, Arabidopsis thaliana
taaaacaaaacaaaacaaggaaacattccgacagaattccgcggtcacagtcttctagtaagcgaataccaccatggcagattgcgctactatgagatttcaattacttatatggatacttgttttcccaaaggtcttagtagccgcccatcggtggcattccatatggaggcattggaggcattcctgacattcctggcattccacccatttgtggtggtggaccatacccgccacctcccattcctggcatcggtggtgcgggtagagccagtggtaataattgggcgtacatgttctatttgagaaagagaaaaaaacgagcataaggttgtatattgatttgttttttaaaaacattttaccgtatgatgtctgagtgtagtacctgttgtgacatgacatccttctcttcctgttctttggccttcacctctttttgtgcctccagcttgtccttgattagctcatccactttgccggagtattctcggataaactgtgaagaaaaaatgacgggatcaaagagagttgatcatagcgtcagtatggttcctatctcatcaggtagagggtattttagggattggaggataaattacctggaggagatacgggaaggcaaagtcgatcatattgttgatcaagcaagttctagagcaacgtctggtcggattaagtcataacagacacagagacatgtagcaaagcattcctttttcccctgta

SEQ ID NO: 50629 - DNA, 758 bp, Arabidopsis thaliana
gataccgatactccatgtacattatgactcaaaggttacctggttagtaaactcacttgcacgctatccacaagaagccttgcccatcaccaattacttcgcagcgagtgagctgctcctgccgtcgcccgtgccttcaacaaactgaaacactacgcgaaaacgcccgtagctggctgtgaaatacccggaacatgcccttaccggcctagctgtgcggcgctcgcaaagccggtgaagcacaggataacgcccgcgctgccttgcgtatgcttaccgaaaacggtcatcagccattactgcaagaaatcgcccgacgttataaccagccggaagtaaccgatgcggtgaacgctcatgttgcgctcgatcccttagataatcacccgacaaaaatccccactcttccggccttttatcagccatcgctctggacgcgcccggtattaaaagcaaatgcccaatcactgccagatagcgccctcctccacctcggtgaaatgctccgcttccctcaggaagaggctctgtatccgggattattgcaggtgaaagacgtctgtgccactgactcactggcgggatttgcctgagatctgtttaccgcctggcagaccactggcgcaccgtcgaaagagagttgggcgttcactgcgtgaggcgttctcggtaacgatgacaccgcccgcaaactgacgccattaatacacgcctggcctggtgaatcccagcataaacgcgccaccgttgggttggat

SEQ ID NO: 50630 - DNA, 544 bp, Arabidopsis thaliana
tgaatcgcaaatgtttccggtcacagggatgagtttagttaacatgaaagacatgtaagatgctccatgagtctcttttagagtattaaaaagctctgcatctaacacctgtaaaggaggccagagttatgcacataacaagtaaagaacttgactaacaaagaatccaaatgaaagggacttacctcgttctttagccgctcgatcgcagcttctttgcttttggctttaatcaagagatatatcttgctgacatcaggagccattctcaagactttctcaatcagtactagatatatcgaaagaaatgatttagagacggataattgtggaatataatgaatatatatacatggagtttttttttttttacctttagctaagaaaccggtcgagccagtgattagaaacttcttcccttggaggaaactgattatgccaagtccttctttcatccccaccatagaagcgccactaaaaggcatcaaagtctttactccattgatctcaatggtcacccattcccgtttggagacagaaccaa

SEQ ID NO: 50631 - DNA, 905 bp, Arabidopsis thaliana
tctgcatatccacgaagccaattgcgggtgcaaattaatgcttgcacattttggggaagaagacgattcctaaaaggatttaacacccgtcctccaacgctgaaagcagactctgatgctactgttgtgattgggatactaaacaaatcagatgccattgaagctaaatcagtatatctatgttgattctctttccaaaagcttaaaatttccatgtcagagaaagtcttcatctctaatcttggttcatcatccaaatagatttccaaagttgacttggtactttttgaagcagatatgagactactttcaagctcaaaaagatattgtaaatacacaaatagacacacaattagttaaacaaaaaccagaactagtgaaagatattcaaatatattattatacttacatcattcacatctgcttcaagtggcgattcattgagaagctcgtgtggagtaagtgtggttgaagagttcgaagaacttgcagatttagtttggtattcttcataaagcgaaatcagattattcctcacaatatcaacttttccctcggccgtgacgggatccactttgttataagctgacttaagtatctgcaactttagtcttggatctaaggcagctcccatagctagaataacactatattcattccaatactttgcaaatttcctttgcatcttcttagccatttctcttacatcaacatcatcacaattagcatatttcatcaacaacaactcaattttccacagttcaacgatcccactcttcttctgtaggcaaagaacaataacctctttcatacaaattcaaaatagcaaatgcttttctgaattttaaagctcttgctagcatttcataggttgaattccacgagtggagacatctagagacacc

SEQ ID NO: 50632 - DNA, 771 bp, Arabidopsis thaliana
ccgtagtttccatggactagcgagtttctacagaaggttcgttagagacttaagtatagtggctgcgcaatgactgttgtgataaaaaagaacgtgcctttctcatgtggagaacctcaagataagtctttcaacacgttgaaggagaggctcacgcaagcaccggtcttagccttaccagattttgaagtaatgttcgaagtagagtgttatgcttcaggattgagaattggagctgtactacatcagagaaagaggcccgtagctttctttagtgagaaactaagtggagcagcattgagttacccaacatacgacaaggagctctatgctttggtttgagctcttgagacttggcaacattacttgttgtccaaggaattcatcattcataccgatcacgagactctcaagcatcttaagggtcagacttggcttaagaggagacatgccaagttgttggagtttgtagagacgttcccatatgtgattaagtacaagaaaggaaaggagaatgtggtagcagacgctttgtctaggagacatgcccttatagctactatggaggctaaagtgatgggttttgagcatatcaaagagttgtacaaagacgaccctgagttaggagaatgctaccgagagcatggtaaaggactttacaagacattctacttgcaagatgggtttctattcaaagacaagcggttgtgcaccctcaaggttcaatgcgagagttgatacttactgaagcgcatggtggaggtttgatgg

SEQ ID NO: 50633 - DNA, 342 bp, Arabidopsis thaliana
gccctctgtctccgatctcttaaccgatcaagtctttctctacatcggtatgtacgcggaacagctcgagatgctttcgatagcttttgcgggggacactgacaaaggaatgctctatgtgttgaatggatgcaagactctgagtccggtagcatagttggccagtagttgtagtgacccgcataaaggcatcgggcatgggccaaggatcgaatgagaaaaagttgaccgaatacacggccgatagactgaatgtgcccaaaggtaccaaactatcaaatgacaaaaacgggcaagaatgggcacgaatgggcaaagatgggaaagattggacaaaacttt

SEQ ID NO: 50634 - DNA, 541 bp, Arabidopsis thaliana columbia
caaaacagagaactagaagacatcaatcatgatggttccgaagaagaagaagaatcatacgaatttggcgaatctgatgagtgcgttgagtttgaaaatgattgtaataatttagaaaatgaatcataataaatgttgttactgtttaattttgatgtatttaccaaatatgaattaattcagaaaatgatttatatatacttccaattttctaattttaaatttttactttttaatttcttaaattaaaattttgaattttgttggtattattattattattattatcatcatcctcacgttttacttacttgcgaaagagttactactcatcctcccaaatccctagcaatttgcgagggacttactaggaagacacgcatctccctcgcaaataagtgcaaaacactaatcgggtcggcctgcctcgcaaatccctagcaatttgcgagggacttactacgaagatacgcatcttcctcgaaaatatgtgcaaaaccctaatcgagttagcttgcaaccctagaattttgcgagggat

SEQ ID NO: 50635 - DNA, 1168 bp, Arabidopsis thaliana
caaatgagcaagaacaagctgtttcgttgctactgatattatggaatcacagtgagatctgtagcgagatggttttacaagaaggagtgataccttctttggtatctatctccgtaaacggtactcaacgtggaagagaaagggcacagaagctactgacactattcagggaactgaggcaaagggatcaaacccatctcacagaaccgcagcatacagaagtcacaagccccgaggacggattctctgttgcttcagccgctgtaacagagacaaaaccgcagtgtaaatcagcctcgagaaagaaaatgggaagagcattcagctttctatggaaaagtaagagcttctcagtttaccagtgttgagtcatgtctttattacctttagttgatgtaaagttgtactttgttttccccatctcaagacttatatctctttttgaaagtcttggaggtaaagagaaaagaagcttgtataggtatgtagtttatatccaaggatttttgggttctggttatacaaattgtcaaattacaatgtacttgttgggtgtaggttttataactactaatgagaaatatttttactctgaaagcaactttgtcataaattaaaggacgagatacgaaattcataaaagattagaccgagaagccgctgaacaaaggagagggtcttaagtacacttgtggcttgcttgatttttctcgctttattttctatttttcgattttcatataatatacagagaagattttgaacggaaaaggtttaggaaaaatgtgttgttgatttgagatttctcgaagtgttggtgagcgattagggttctgtattgtgaatctatcgcgtcgttcgtcggagaatgaatttcgttgtacagagattttagactgaacctaagcagaacttgcaggttacagtttcctttcgtcgatcgattgctgaacttgataggttctttgagtgtttctctgcgatatggcgaaccttccgatccttcaatttgaagagaagatcgtggaaacagtggagaagaattcagtggtagttataattggagaaaccggttctgggaagagtactcagctctctcagatacttcatcgacatggttcacaaagtccggcgtcatcgcatcactcagccccgacgtgttgctgcg

SEQ ID NO: 50636 - DNA, 769 bp, Arabidopsis thaliana
aatacataaggttctctataaattattaaataattttgtatatttattaatgtataatttgtgtattcagcatcgcacgcagatcaagtttgttatattccgtatccatatacaaagaaaccaaaaagcatttggctaaatgttttaaaagttaatcctcggggaaacatttctggagaatatgaaaacaatgatccgactcttttgcaaacagaaaatgatgaagctgtgttgctgactacaattgaagatctggtactacacaatccggtagaaagcttaaacccaatcatactcgattacgatgtcggagatgctgaaccagaggatgaattttgatgtaatttatcgtcttcagacgatgatgaaatcgaagatgatgaagagttctaaatgtgtgcttatatgtatattaacttttttatttacttgaaattttttgtttaagaatcatatcatgtttaattatttgaataaatattatagaaattttataattatcatgaatacttctaaatataattaatttgttgggctgtcgacatcccaagcccaagcccaataaaattaacgactgaagtacgactaaccgacgacagacgtctaatgatattgggctatttaatttcgagcctaaaaccataataatgtgcgactataatacgactaacttgcgacaggctttttacttgttgggcttagtaatccgaagccaaacccaataaagctacgacgatattcgactacatgcgagacccataaatttgtt

SEQ ID NO: 50637 - DNA, 1010 bp, Arabidopsis thaliana columbia
aaatcgtttgttggctgagtttgtataacgtggtggttgacttgtcaaacccaaacttccctcccatcaaataaaccagacgtgactttaggactatagatacaccggtttacgacacccgaatagtcaagtatccaaacgtcgttataggaccaaacgtcgttacgttagagaaccaaacgtcgttaggttagaggacccaacgtcgttagaggactatatatacattggtttcctcttgtcttttcacttgtcaattcttagcaactacaactcttcattcttctcttgtcctttctctgagaaagaaaaccattccgagatcatggatgcatccggttcaggttcaggttcaaacaagcggcggtgtgtggatgacggtcccaacaaggggccgtctgtggatgacagccccaccctaaagctgtatgaacaggagaagcgtttcaaatgcgtcatctcttacatcaggagcaacataagggagacggaggaagcacacttgctcgatatcaaactgcatgagaaggaagcggaacttaaggtcttaaggaaagtggagaaattgggggacggatttaacgtgaaatacaagatcgagaaagtgctggcgcaggtggcaaggctacagagcgcagttgaacgcccggtgagtagtattgactgggacaaactggggtatggatcgaccgaccgtccaaattcggagtctgattaagaatgaagatggcgatcgacgtgattgtatcttcatttattattttcaattatattatatgtatgttgttggattccagtactccttatcctatgttatcatgaactctgtcttttcaattttcaaacttcactttttattttatactcgcgtgtgtgattcgaaaactttgtctttcagatttatcgtatattaacttgatgtttggctgagttaaacatgtgactcaatcattgttattctaacgttaaggcggacttatcgtagattaacttgatgtatggctgagtga

SEQ ID NO: 50638 - DNA, 850 bp, Arabidopsis thaliana
tgattgggatgttcccggaaccacaccggaatactccttaccaaggtctgtgcactatagcacatctgaatgggtcacactcggggatgagaccacatgttcctgtgaatcaacataccgcacacccaaatccgtcgcagccaaaagaaatttaatgaaggaaatgcggaaggcagtaatgttcaaaatgtgccagagactcaagagatgttggggatgattcagaccttgttgactcacatgattcaacaacagcaacaccaacaacagatgcaggaaagccagcgtgcagaatctcctggagaaggtcttaaaactggttatgatgatgaaggatcttggtgttcggaagttcaaaggagagcaaaatactgttttagcggataagtgtttgaggaacctggaaatgaattttgaaacttgaaggtgcccggaagactttaagggccagatagcggtaaactttttagatgcggatgttcgagcatggtgggatagtgttgtttcacgataccgcgaccagcctatcacatgggaaatgtttaagaaggagtttgagtctaagtattttccacctgggcacgtgatcgtctggagctacagtttatgagtttggaacaagggcaaaagagtgtcagggcatacgagcaaattttttcaagacttcgaagatatttgtacaatggaagggatgatgaagctatgatggtacgaaggtttttaagaggactaaggcctgaaattaggggacgtcttcaggctgtgacttataccaatgtgagtgaattgactgatagggccgtgaatgttgaagaagggattgagttagaaaagggaaacaagtttcaga

SEQ ID NO: 50639 - DNA, 557 bp, Arabidopsis thaliana
cttactctgtttacttctctccaaagaaaacaattctggtgtctcaaaccttgctgtcatctgttactactcatcttcttaacacacttagtttcatctctaattcaagacttctccttcattggcttcaaaaaagcctcaccaaatttaacgttaaacggagttgcagagatcgcccccactggagcaatcaggctcacaacagagacacagcgcgtgattggtcacgctttctactccttaccaatacggttcaagccaatcggtgtaaaccgagctctgtctttctccacgtcttttgcaatcgccatggttccagagtttgttactcttggtggccacggacttgccttcgccatcactccaactccagatctcagaggttctcttcctagccagtacttaggcctgttgaattcaagcagagttaacttctctagccacttcttcgctgtggaattcgatactgtcagggatttggagtttgaggacattaatgataaccatgtaggaatcgatataaacagtatggaatcgagtatttcgactcctgctgg

SEQ ID NO: 50640 - DNA, 703 bp, Arabidopsis thaliana
aagtgaataactagatattctcagtattagtcaaatgatatatgcaaatgtaagaatataatgtacttaattattaaaaacatatacagacaagtttcatattggacattactttttaaatggatttcaacaaaaataataattcgtcattgtatgcgataatacttctacacgatttggtaacgatttctctcgaaccgaaaaacaaaaactaatcaccgtttaagtttcttcattttagtttcatatcattgatatgttgcgtttttggtgttttacgtcttttagtattgagttatttatcgtatcatagtccgtcttttgcgtcttttcggtcgtgtcttgagtcatttgcaggttttaggtgtttaagcgggacataaatattttcgcgacttatcgggctcatttggaccagaaaagatagcaagaatcgagaaatcgtccgccagcactggatcgatcgatcccaggtgatctgcattgatcatcatcagccttacacacaaaaaggctatcatctgcaaaaagtaaatggtgtatagaaggaccttcaggagaaaacctcataccactgatgagaccttgctgttcagctctgtttagaagatgcgatagtccttcagtacataagacgaagaggaagggagacaaaggatcaccttgtctgagacctctctgtggaccacaagaccatgcgggt

SEQ ID NO: 50641 - DNA, 533 bp, Arabidopsis thaliana columbia
ggtcgattccaatgagcttcctttatcattgtttgtgtgttagtgaatgtatctagctgagttttgcagcaatgtagatgttacaatggtgcgattgaatagtatttctcgttgttttgaactcgtttgcaagactagactctgagtcactcttgtcctgatgtatctagctgagttttcctgaaatttagatgttacaatgttaagattcaactcttttgcaagacttatactttgtgtagcttattaagatttgttgtttgatttctgtttttttacttgcaggcgaaatatttgtttccggagagtcacgggttgaagaacttgtcaatgtgttgaaggaaaagaagataggagtggttgctcatttctatatggatccagaagtgcaaggggtcttgactgctgctcaaaagcattggccacatatctctatatctgattctcttgtcatggcagactcagctgtcacgatggctaaagctggatgtcagtttataacagttcttggtgttgattcatgtccgaaaatg

SEQ ID NO: 50642 - DNA, 492 bp, Arabidopsis thaliana columbia
ctccttcctaagcgttttgtttcctgccattcacatcgtaaaccttaacagaagccatgaattgtcaaaccagctcagggtacaaatcgtaatgcctacaacagatggttcccaaacctatgtcatctagcattcctaaaacagatttctctatctacaaacgctgcatcaatcttaaatccgcaaaccgagtaggcaaaatttctacactcattcaggcattatagaacatcatattcatcccaatttggagaaaaagggcgattaatatagtcacctttagtgaattccctgttgacatctttctttcaaaccctttgagaaggaattctctttgttggaacctttggccatggaaatcgataaacaggaggttgaggggctgcagctgggaggggcggagaccagcgacggtggagaagctccggcggtcgcgagcagcggcggaggaggaggatggtccaacgttcttcctcgccttctttttctgcc

SEQ ID NO: 50643 - DNA, 604 bp, Arabidopsis thaliana columbia
gagaacacaatgtcaaatacgtcttgaactctccaccaaacttaaattacacagttaataaaaatcaagaccaaaacaaacaacaaacaaagaaaaacaaaaagctacggtatatacaatagtagtggtggtgttacctcagtgatcaggtgaagtagacggagacgaaatcgtccatactctcttgagtataagcaggaactgatgttgaagcgggaggattttgctcgtcatgtccgatcgagtaggttgtcgagcgtttggatgctctcctctgccttctccttggctctctcagctcgaagatcacttcccgaggatcaaatgatgaagctcgaggttggtcaatcttgtcagcccttcttgcagctgaactcgtggatccgcttcttcttactttgggagtgggagatgggggccttggcttactctggaagtctttgatttgagcagccatgtccttctgtgaaaagcacccattttagtgatatagagtatatacagaactttaggtatataaatcatcggtttcgtaacttattttagaacttgtttaaaaatatcaacatgacaatgaaagacccatggacttatgatatagatt

SEQ ID NO: 50644 - DNA, 661 bp, Arabidopsis thaliana columbia
tgtatgttgtgtaatgataacactgtattttactcatttaggtgtatgtttatcatcatttagctttacatttgctcattgtatcatgacattttgcaccattttagcttaatttgcatacttaggcatctaggatcatcttggattcgcattgcatgttttggtgtgttttcaggtgcaaaaggagcttaaaatgactctactcgacccattcactcgagccaggcagctatagaggaggcatcattctactcgacctctttactcgatccaggatgccacagaggaggctgcagtttactcgatcctcctactcgatcaaggcaacttcagatgaagcagcagattcatccacttgcacgcccctcctactcgatccactactcaatccatttactcgaccaagggtgaccatctctacaagacttgttgagctatcaaagcgtcttcggatcctcctcatttcccactcaaccagacatctgagcatacggataagagaagatgaggcatctacttgaccaattgatcactcggagcatagacacaaaggcgcagactttgcagcatcctctttactcgatccccaaagtcgagtattcgcccaaaccgcctcaactctcttgtcttctagtgaatctagggtttcaacattatacga

SEQ ID NO: 50645 - DNA, 825 bp, Arabidopsis thaliana columbia
cacaagcaatggatgatcaaaaagagagagagaagaaacgaaccgagaagttatcagagatagtctgacgattgagtcctgattcaactgtaacagtgaatttgtaaagaatgagagcaatgactcctgcggctatcgcaccaagaaacgcctgagccgccgatggagttgaattaccaccttctatcggagttgaacttaacgcttttagattatccattgcttcttctttcaacgatttcttagctccagtagatctaaatgtctacaattccacaccaaatcactcatattccttcccaaatttcaaacacaattctcccaaattcaagtgtaacagatcaaaaccattggttaaattcgatttagaccaaattcggtggttatttgttccttaagaatgtctagggtctaagtaacgagatattaccagctctttggcgcgtttagcgcgccgtcgaacggagcggatgaggaagacagtgatggcaccggtaagaagcacactggtggccaattggagaggagtaggatcatcggaagtggcgaaaatggagttagtagacgaaaacggagacgtggacgacgtaggaagctcaattggaccatcttcttccacctccgccacatcggcgatttcttttacggcggataatcggattataccgggacggatcctggtaaaggaagagagcgaatggattggagagataagacgcgttggacggagacggtaagggagagagaagagacattggtggtctgcaacactaacattttcttagccgtcgaaagatttttatctcaccattaatgtcttcttgg

SEQ ID NO: 50646 - DNA, 767 bp, Arabidopsis thaliana columbia
tgcttttgataattttcagttttcattagtcgattgtgtagtcgagcttccaaagctggatccttcaaaattccttagtgttggtgtttgattcagttcgatgatgtaaaaactcaaataagagtgattctagaatgggaaattttctatagaaaggtagactctgttctgctgtctcattctgaagttttcctttttggattaccaaacctgctagcttcttactcaatttcacctttttagcaatcaattttttcatctgttgacttgaaaatttccgggaagttttatgtttgaaattgagagaaagtggggttttttttttgttttcaggaaaggttttccaaaactttaatgtagtacagagctgctaccgacaaaataagcagtttaagacacgataccaaagagaacctgacctgttcatgtctactttacttccctgtccaagagagaagatggcatttaacctcaactcttccatgcgtgcccacactttgtctaaataccagtttgttctttcaaagcaaagaactttttactgcaatggtccgttctaggcttctttagtatttttttcccggcatcaaattttttatagccctgcatttgtgtattgtttccctattttgcttggcaaagagatgtggtgttccttaaatctcttttttcttgttgaaatgggtgccttactttggagttttcatttgcagctacttcgtcaagtgctactgtgccatctcttgacaaaaatgattttctgaagc

SEQ ID NO: 50647 - DNA, 624 bp, Arabidopsis thaliana columbia
gcatcattgtaataactaacactatcaaagatcccaactttacaccaatcctcaacagaaaccagagagtaattaagcaaccaaatatcagtaaccacctaaggcatcactgtaatacccactaacagtatcaaagaaagattcaaactttacaccaatcctcaacaccacagagtaagtaagcaaccgaagtatcattgtaacattacgaaagaaagattcgaactaacagagagtaagctaagaagcatgagtgtaagaatagtgaaaaagcagaaacctgtcgctgagcttcgggaagagaaagccactggtcgaagagcttctgagtgaatccaggtttagaattgagaacaaaggaagacatttcctgaagctgcaacaaatctgcatccaaacaagccatatctccgggaataaccgtatcgcaccatatttaatcaatcgcatcaaagtcgagaagatgagagaatgatctttgaggcgagcgaaattggaattttgaacaaagtcgagatcttcttcaccaacacatcgaatctagtcttccttcttctccgattccgtacaaggaaatgagacagccaaattcttttatttatttattcttttgagcaatctgaa

SEQ ID NO: 50648 - DNA, 531 bp, Arabidopsis thaliana columbia
agattggtgtaaagtttgaatcattttttgattctgtgagttatgacgtatattcttattttcttatgtgagtattacaatgaagcttacgttaatgagatttgtttgctaaattactctgtggtgttgaagattggtgtaaagtttgaatctttcttggattgtgtgagttatgacaatgatgccttaggtggttaatgagatttggttgcttaattactctctattcactggaatctctagtctaatctttttctcgttggttttctaggttggatcattgcttaaggatgctgtagctggagctcctatcaatgttactggaagtgcatcgggttctaattctgccactataccatctatgtttcctgcgggaagtgctcctccgctttcaccaaggagttgtggttcaccccgtacaaccaaacagagagccccttctaacttaggttctactctcaaagtagtcaacgagcctgttaaagagcctatacctcaggtttcttttccgcgaggtcctatctttagaga

SEQ ID NO: 50649 - DNA, 601 bp, Arabidopsis thaliana columbia
cccctacaagtaatcctatgatcccatccgctgatgaatcaaacacaaacctcgggagtgactattattgtctctggtgaaagcttcgagggtgacaccgaaaggagaaagaaaagatgtttgaacggcagaagattcatcggagggagcggccagatcaaaacagtaccctccggcaacatctacggcggttctggtggtggaggagtcaacatccgtacggtgatgattttgatcatgaggagagagagagaagcctaaccagttattcatcgagttcatataatattctaactactccttgtgatagatgagagaagaagaataggaaaaagaacttagttagggttcatgcatgaagaggagaaagaaaaaggttttggtgttaaatgaagagagaagaggaagaagaagaagaaaagtcaaaaatataatgttcatttcttccgaggcgacatattatgcgcatttagagaattttgcaattaaattcagaaagaaaaaatatttacttgaaaaatgtggagatgtattggtcggtttgaagggtaggggtagtatgtcgtttcactggataactcgtaatcgaatttgttttgat

SEQ ID NO: 50650 - DNA, 917 bp, Arabidopsis thaliana
tagagtctgaatctgctgatgttggggcagtcgtatctaatataaagttggtcttggaacttattgatgaaagggttatgcttttagcggattgcaaaagacctgtgactcaaatattgaacactttgctttcagaaaagggtactgattctagcctgcttctctgcgtgctagacatgttaaaaaggtgggctgaggatgatttcggaaagaaaggttcttctgggtcctctggtgcttttcttacccagaaggatatagtttcttttcttcaaaagctttcacaggttgataagcagcatttctcatctgttgctttggatgagtgggataaggtgtatctccagcttttatatggactttgtgccgattcaacaaagtaagttcttattttaatcttatgttgattcaaagctttttatgagagagacaatatcatctgtttcactgataggtatccgttggcactccgacaagagatctctctgaaagttgagagacattccatgcttggtttacgggcaagggatcctgatatgcgaaggaagttcttcttgttataccacgaatctctcggaaacaatttgtttgcacgattgcagtacattatccaaaaccaagattgggaagctatgagtgatgtcttttggctcaaacagggtcttgatctcctcctagccatcttaatcgaggagaagcccattactctagcaccaaattctgccagggtagtaccacttttaccttcacaaaatcctggagtacatcaccaaccacctgttatgccggagggacctgaagaagttgcttcaatgtttgatagcattgttatgaagcattcacaatttcttagcgcggcaagcaaacttcaggtgattgctgagtcgttatggtgttttcgtttgtcctgttaaatc

SEQ ID NO: 50651 - DNA, 482 bp, Arabidopsis thaliana columbia
ctcacttactgtggaatcaatccaagtaagattgcttcgttcgtgtcagcactaaggttgagaatttactaagggaaggagaagtctaccttgtcactttaaccgccgttggtggagaagttgaaagtgactcaaggatttaagagatcccggtggtgaacaaatttgatgatgtgttcaagcccttggaaggattacctctgccgagaaatcatccgtttaccattaatcttgaacctgggatgattcgaattgcaaggacactgtaacacccccagtccgaactagaactcagccagtccggcacggcccagacacgccacaatgaaaatgaattcccatagagtagtcgaggttctgaaacacatttcgacccttagccactcaaggttacccatttccccatttgggatccatttaggcttgccaaccctaacttcacccaaatgttgtgtcgactcggacaaagtcttatcagtttg

SEQ ID NO: 50652 - DNA, 537 bp, Arabidopsis thaliana columbia
aatttaaaagcttttaaagtctatgattcataggcaaaccgacatttttgaagtatccaaggaatctgaggtaactggtttattttattcttttttttttttcacataaaagttttttttattaaaagcataacatcttacaatacttcaagtacaaagagacaaacgctcaaaccggttattcaaacccggtatcagagacggcaaaaagaagcccattacaaacataagcccaacaattcatgaaaccactggttgaaggaagagtcgatcatgtccagcacagatacacgtgtcacgaaaggagacaatgatgataacacgtgagacgtcggagttttaggtcatcgtcggtcagccgacatagtttgcaaccgaaaggaattcttagtcaccggaaaaagtcgtaacgagcatcaatacatcaaggctcaacaatatccgatgaacatcaccaccaaattcagagaatcccaaacaaacttcgccgttagatctgcaaaattgaaatcttccatggataaacgcagttcatga

SEQ ID NO: 50653 - DNA, 517 bp, Arabidopsis thaliana
cacacaagcatgccttaaagcacattattaaccctagactctagactcttgcacaagccactctactacattggctcttgtggatacttgagtaaaaagtggaatatcttacaaacacttgcccaagtagaagaaagacaggatccaaagataaatacactgaacagactagagcttatgacttactaagaacctaaacaacaccaaatgctacaagggcatattggtttcatctaactatcattagctgcctctgcaagcttggcggaaaatctaagcttcttgatattgaatcttgtttcctcaacacataacgctttccattcatcactcaactctcttcttttaccatttccaaggttcatcagcttctcaagctgcaacttcttttgataaccacttaaaccttgcgacatcaccgcctcaaatgcatcctgcaccgcgcataactcatcatcatcatcattgtcctcatcatgtctctcttttccactactagtcccattctctgttgttt

SEQ ID NO: 50654 - DNA, 550 bp, Arabidopsis thaliana columbia
gaaattacatattagccttttcaacctcatcacttgattcacgatgaacaaaatatgattttcatgtttcgaattcacaaaattctttgaagaataacaagagaaatctcagacatagaaaaaaaaaaaaaaatcttccaaagctttacaagacataacccgttttggttcatttgttcaacaaacttaactaaatggtcctgaaagatgttgaaattgagtaacacagtgaggacttcatgaactttcctttgctttctttttagtcttcaagctgttttggggcactgcgtctccaaattccagccaagacgctaccgaggattgagtgacagacgctagaaacagcgcacggtactgcagtgagtggattccaaaatgctgtgtcgcaagaacaactccaagcaccgagttcttcaccacatacaaaatgaaaagaaaaaaagcctcagttgacattgagttttcaatagctctggttaccgtttcattctagatactgtttagttactgcatgcaacttcgatagagatagttctcgatgatgcac

SEQ ID NO: 50655 - DNA, 976 bp, Arabidopsis thaliana
tgtaactatttgtctgttttcttgtagctagtgaatatgtaagtctacattaattttggttcattccgggacctatgtccgagaactttacagacacactagatgattatacagccatctttctcgaggtaagatgttgtagtctaattatgactttaagagtccaattaatattctgtcactaatgagcttctcctctatttcttgcagtccacagaaagggattcaagaggcaatccttatggacttggatgtctaaaagacactctaggcagtgcaaccgccaacactccggttcctcatcatcctttcaagccctagaagaatggctgcagaaagctcaaaggaaaatagaagagcaggctgcatataatgagaagagagatgctgagatgcccgagaagctgagtcagcccgagtcacagctgagcaaaatgacaagctcgagcaattgtctttagtcgagaagtatctccgccaaaccgatccgcagttcttggacttcatggccactcactctaccacaaccacagaacgtctaccaagtcctccacctaatgatccttagattatctttgcccaaacactacttgaacttatgtttatttgaataagttgtttgtgtaataaataagataattgtatgtgtatttgaacttgattttctatatatacaagtatgtcttttcatcttttatagcatttcaaataaaaaacgagaacaaaccataactttaaacaacaaacaagaaacccaacaatcgatgaccaaattcttattcggacaaaaccagtagtcgcacaatagtcgtatttaggtagcaaattagacgtaaaatagtcgtataatagtcacaacagttaccgattattatcagactaaccaacctagtcacaatataatagtccattagacgtataatagtcgtaaaacattatacgactattatatgacaacgagaattatttccttaca

SEQ ID NO: 50656 - DNA, 1152 bp, Arabidopsis thaliana
tatgcacaagttagaagagaaatcgagaaagatgagatcttgaaggaaccggtatagatgatctgataataggtttgtttggtttggtaacataatcttgtggagtagttagagttattgcttgagctcatgattcctgttttatgatcttaccaaattatagttttgaaagagtagtattagagcatggataagttcatagcttgctgatgaatagtgttgcaggtcatgccactatcagcattttttgtgagtaaactcttaaatttgccaccacattacgcagccggtctcatattggttggttgctgtccaggcggtaaaatacaattctttacttgattgcattatattaacacttgtatggtgctctgatgcttttccgtttgttgtttgaaggcacggctagtaatattgtcacatacatcgcgcggtttgtaatccaaacaaaaagaaacgacttttgagttccataatacaactggatgatctgagtttcttttttttcattgtacagtggaaatgttgcgctatcagtgttgatgacagcagctagcactgtttcagctgtggtaagttactagattatgacattggtttttctattcttcttgtagataaagacaccccatttaatccattccgttttctagattatgacaccgcttcttacggcgacgttgccaagcagtatatcacagttgatgctcttggattactaatgtcaacactacaggtttggttggttcagtctgtttcttattcggattagaacgagcgagtttttgttcattgactttacccttcttggctcctgtttgtgtgtggtcacaggtggttcttctcccagtgttggctggtgcatttcttaaccaatactttaaaaagctggtgaaattcgtctctcctgtgatgcctccaattgcggttggaacagttgcaatcctgtgtgggtatgctatcggtcagaacgcatctgcaatactcatgtctgggaaacaagtagtcttggcttcatgccttcttcacatctctggatttctctttgggtatctgttttcaagaatactcggaattgatgtggcatcatcgagaactatctctatcgaagttggcatgcaggtactaaacagtacttaaatgaacggtacc

SEQ ID NO: 50657 - DNA, 567 bp, Arabidopsis thaliana
ctcccctttgtgaagtccttgaggcgctttaaatagggtccttaaaccgtctatctagcaatattctcggaagatttccatttatccttaagtcagttatagagaataatcgtcctaaggatattttccttattctttggaggcttcgcgaagatttcctgattcgacattatcttcaaagattctcctttatcatttccgaaagtcttagaaatgatcctattttttcggagatgatcctttgagaatgaatagtttttacaagtctttgcctcgggtgttcttcacggcgcggtgttgtttgagaggtagcttcggggcaaacagtatgtaccagcttggggcacgcatgatgactgtccattgagcttagttgactacccccccccgaggtgatatagatgttttccgaagcgttcttgtggttggatcgggctgtgttcataggattaaccccgagccatttggtgaatctctgagacggttggtcgaataaggtccgaggtgctttgttctagcctcgggggcaatcatatgtttaacctgaggtgattgttatcttatatt

SEQ ID NO: 50658 - DNA, 1110 bp, Arabidopsis thaliana
caaaatctacatacctaagcaaaaatgttgagagtgaataactctcttttgactatatgttcccatatattttaaagctaattgctaatagtatattaatgtatatataatcagataaacattgtgtggtacaagtactcgtaccacttaacgcttgtttgtttggtggaagtagggcgactcaaaataataaaggacccagagctgaaaaaaaaaatagttctcatttcctgtgttttgttatgcaaattcttttttggatcgtaattgtactagatttactttaaaaaaaaagagaaattttgggtggacctgtacatcagctcctccagcacatgtgtagagccgggcctgggtggaaggtaagaacaaaagaaagaaagaaaaagaatgcacgtatttaagaccattttgttacaccaagcaacagccaccaccatctaagatggtacggtaacatacgtttgaaccgttaaatcaacggctgcaaccgcagctacaattatcgcaattattcatgtatgtttatacggaattaatgttcaaacaaaaaggattttcaattaacaaacacaatcaaatctctctttcttttccttctctattaggtttaaagcatgtattttacactggaaccctagaaacagtcaagagtcattatcttttcgatcacatagatacaaattaaagaaaatctcgtgagtaacaactaacaaaggatacaatacaaatctcttgagtaacaactaacaaatatcgaaagaacaatggcgttatttcggtaaccatgaaaggtatatatgacgaagaagctaatgcccaaaaaagagataaagaaatatcattatcttatatctaaagagaacctcaaattttaacaggccccacatccacctcctcctcccccaccaccacatccccccaccaccgccactgtgaccaccatcacaaccgttgtcaccaccgctactgccaccacaatcaccagcaaatgctgaagtagaagctgcaggcgtcacatcatctctctgtctccgaggcctctccaaatttttaggccctgatagcgcaaggtattgtctactgcgtttggctcagtggaatgacaga

SEQ ID NO: 50659 - DNA, 850 bp, Arabidopsis thaliana
  unsure (1)..(850): unsure at all n locations
gccaccgatcaatatccgaggggaaggctaaatatatactcaagaccagatattctatcctttatctggaaggtttttcatgggacaaaggaattagatttcattcttcaatcttgctttggacctctattccatttaccggttagtaagtgtgcgatgtcgggtaagcttatgcatgccttgctatgtaggcagctggtaacaaagaagaattatggagctgtggacattatttggtggaccccaatgagactttcattacttgaatttgcttacgtgactggattgccctgtggtgagttttctgaggattacgatccagatgatgatccgatttttgttgttggcatgaagagttactggaacgagttaattagtctaaacaagactgttaccttaggggatgtatatgccatgctaaccaacaaacgcaagacattgtcatctgaccacagacttaagctcgcgtttctacttattgtagatggtgtactcatagcatcgaaccaaatcagtagacctacatataaatatgtagagatgttggcagatctggataaattcctttcatttccttggggtagagagtcttttctgaagactgtagtaggaatgagacccgacaaacgaaatcccggtaagtccactggtaaaagacagttgacaactgaccctatcaagagtttggtgagtcgacttcagcagaaaacattccgtttgaaaggtttcccctagcgttgcagctcatagcatttcgtaacatacctggactgttagatttgctgttagatgactcgacctctaagacaatcctccattggaaacgattaactcatccanaacaagttat

SEQ ID NO: 50660 - DNA, 625 bp, Arabidopsis thaliana
tgtagagaagaagaagaagaagaagaagcagaagaagccatctaaacctgaaccaagaggtgttttagttgtcgacgaagatccagtttggcaaaagcaggttgatcctgaagaggacgaaaacgaagatgattcagcaggtaaattgcttgactgtttcttgtttcttggacttgtgcatctgtaatgctttcacttccctgatctaataacagttcacatttacatattgtgttctcttttcatttgtttcgtatagaggaaacacctctggttgatgaagacattgaagttaagcgaatgaggaggttggaggaaattaaggcaaggcgtgctcataatgccattgctgaggatggaagtgggtgggtaacgttacctctaaaccgtgaagacacacaatctaatatttctcctccacgtagacaaaggactcgtaatgactcgccctctcctgagcctgggcctagacggtcggttgcggatagagttgatacagatatgtcaccaccacgacggagaaaacgtcacaattcgccttcacctgaacctaacagaaaacataccaagcctgttagtttggattcagatatgtcaccactcgcaaaagaaaagccaggaatga

SEQ ID NO: 50661 - DNA, 575 bp, Arabidopsis thaliana columbia
ctaaagcaaataaacgcatgctcacttcgagtggaaagaaaaaggtagaaaagctgtgaaaaagttgtcggtaaggttctaaggatgaagttgactaattggggaccttgtttcggagcaagttcccgcactcgtgcccattgattaacaagaatccggtcaagttagtgacattaaacaagcgcttcgtgggatgcaacccacaaggtattgtacatactttcttttccttctttcattttctttgattttggtttgtttcgctccgatgtggagtttagacttatcgactcaacagtcgatagagtctctatatttgacggtggtgtgagattgtttttgagtgcagaaacccgccaggttgggatcgatcgatcctaacattggatcgatcgatctagtcgttacgtcggagctcaaaaacgtctgccagattgggatcggtcgatccggtcgttacatcggagctcaaaaatgtctgccagaattggatcggtcgatcccatcactggatcaatcgattcggtcgtgtcgttgacacaaaaagaaatgtgaaccctaaaaaatcaccagtg

SEQ ID NO: 50662 - DNA, 1025 bp, Arabidopsis thaliana
tactatcttaaacacataagtcttcatttattctaccttgtcccgggttgtacaccagtctattgtgtcatgaggcctcagcatttgtatcctttggcaaaaccaaaccgatcaagcattccgaggaagatggggaaacagaaagcaaggaacatgtctcttgcgagtgtggaagaatgaagagatgccttgcccacatgggacttgatgcagggatctttattactcctgcacaatctctctgcttcaagtatgttatgaaatcttggagctgccaccagaaagagagttttgatagagttattatatttacgtaggaagacaaaatggtgttatgatgattcagggtttgaaaatgtgacacatacccctttgcgatcgctgaaagcagcaggaattaactgacaaacctccctctgcaaaacagcattccttaaatcgtgtaacaaaaaagcttgcacagtcgataaattttacttcgcaatggaggtggaaacttactttgtgtggttgtgtattcgcaaaagtagcttttacgttcttcatatccgtgcgcttagtcatatccagtttaactggccatctgcaagaagtaaaaagacaggaaagaatattcatctcatagcacatcacttcattataaagaaagacacaacacaacaaattagagtgaggtgttgtcactcactgcacaggctcgggagatccaatgatatatttgcaaatgtctgattccaatctctgtgcaatgatggtggagtaatgaactccacttttggacaaagcaccctgccattggtgccctatgttctgtttggaagcctctgatccacacaactgggtgaccattggaggtaagcgtggggacaacagtggagaaaaaggaggaggaggaaccagaggtgggtgtgagtgaggcaaaggaggtggtagagcttgaggcggaggcggcatcatttcaggcggtggttccggtggctgggattgaggttgtagtggtggctggagtacagaaggtaatgaat

SEQ ID NO: 50663 - DNA, 554 bp, Arabidopsis thaliana
ttttagagatttcaactcaaaagttttcaatgacaaaggggttttagtgttttctgccaaaaacagttgattgagtataaaattttcggtgtacgtgtatatgaatatcgagtttatgtttagttggtatttggatatagtgtacgtgttaagaacttcttcgttttatcaagtttcaggaagtacttctaaggattcgggtgaattaccacagaggttgtttgcactcgaccactaccctaccaaggcgaagataaatgcgtactccagaccggagtacattggtcaaatagcagctgcgcttaaggacacaccagaattgacgttccttctagagtctccatttggtgacctctttaggatccctactaacaaggcatcttttctggtaaacttgttcttgggttaatatgtcgtcagttagttacaaagaaatgttatgagatgtggatggtattcggtggtcatcctattaggttaggattaagacaatgggcacgtataactggtttggaatgtggaagtatcctaaaaatagtgttgtagaactgtta

SEQ ID NO: 50664 - DNA, 703 bp, Arabidopsis thaliana
ctcaatctgtggctgcaaaaagagcagtttcagcagagaggaagcgtccttcaacaccaccatctccgactagtccctccacgccgatacgtgacttgtctatagacttaccagcttcatctaggaggctatctactggtcgtttgcctgaaagcttatggccttccactatgagaagcctcagtgtttcgtttcagtctgattcagtctctgtccctgttagtaagaaggagagaccggttagtagttcttctggtgatcgaacattgagaccttcttcgaatatagctcaaaagcataaggctgaaacgacctctgtatcaaggaaacctacgccagagaggaaaagaagtccattgaaagggaagaataatgtgtctgatctttcagagaattcgaaacctgtagatggtcctcatagtcggttaatagaacagcatcggtggcctagtagaattggtggaaagatcacttcgaattctttagacagaagcttggatcttggtgacaaggcttcaaggggtataccaacttcagggcctggaatggggccgtctcttaggagaatgtcacttccattgtccagcagttcacgacctttgcataaaacttctagtaacacatctagttatggtggcttagtgtctccaacaaagtcggaagataataacatagctcgaacttctggggctcaaagactatt

SEQ ID NO: 50665 - DNA, 1074 bp, Arabidopsis thaliana
ttaaagaaaaagaaaactacaaacgaagtaatggatcgtctaatatattatttaagccaaaggaggagacaagttctattttagatcaccgacatcaagactgatcaatatccatatgcaacccatattgtcatattgcacgaatcatacaaaataaacaattaagaacatgatataataatatttctatgattcaaaagaaatgtttctacatataaatgctcattaaaaataataataacgtgaacatgaacgacacattggccgactaacttagacaaaggcggcatgggctcacgtgaagccgacctttctaaaaaatctccaagccctttaaaagattcaaccatcccctaaacctctctctctcactccaatttctttcattaccatataaatacaacgccttcacatttgcactctttatacatttctctcgagagcagaaacagagtcaccggtaaactcatctccggcgacataaaaacacaaaagttcatatatttagattctggtgactctctgctctaatgggtcaatctcaagtttctctctttcttcttctaattcttgttttcatctatggagtttcctccaccactttcaccatcgttaaccagtgtagctacaccgtctggcctggacttctctccggcgccggaacctctcctttacctacaaccggattctccttaaaccctaccgagacacgagttatcccgatccccgcagcttggtccggtcgtatttggggtcgtactctctgcacacaagacgcaaccaccggaagattcacttgcatcaccggggactgtggttcttccaccgtagaatgctccggatccggtgctgcacctccggctacactcgctgaattcaccttaaacggagctaatggtctcgatttctacgacgtcagtctcgtcgacggttacaacatcccgatgaccatcgtccctcagggtggaggagatgccggcagtcgccggaaactgtacgacaaccggctgcgttgcggcgtcaacggtccatgtcctgctcagctgaaagtggcgacgacgggagctgaaggag

SEQ ID NO: 50666 - DNA, 665 bp, Arabidopsis thaliana
tgcacgccacagcacccgttccagccgcttcaaccgttactttcagctgctccggacataagccgttgagatccgccgcgcaacccgttgcgttacacttaccgactccgatagctccgccgtaaggaacgatcgtcattgggatgttgtaaccatcgacgaggctaacgtcgtagaaatctagattttcggcgccgttgagtgtgaattcggctagtgtagctggagggattgctcctgcgccagagcattcgatttgggatgagccgcagtcgccggtgacgcaagtgaatattccggtgatttcgttttggttgcagagcgtgcgtccccatatgcggccggaccaagcggcgggtatggagatgagtcgtgactcaaaggagttgagggagaaaccagtggtgggtaatggagcggtgccggcgccggagagaagtcccggccagacggtgtagttacactggttaacgatggtgaacgtggtggaggaacacccattgatgaaaaacataatcgctaagagaaagcaagagactttagccaaatccattgttaccgtttgatgttgtatgattcaggagaagttagggatcgtgtttatataagagaacggggatttgtgttatggaaagtttcataatatcaattttccctatatgagt

SEQ ID NO: 50667 - DNA, 548 bp, Arabidopsis thaliana columbia
ctttcatattttttttattgtgattaaattaaatttagaaatatatggtatgactttttcggatcataagtttggtaaagctattaagcatacatttagaggctagtgaactagcaacgaggatgcacatagcaactttgatggatagagagaggtagtgggatagctattgcttattgggcctctactggttgttgtcgcgacttctattattaggtcgaaactctggtggctaagcctaagactatgagttgctcatgctctcctttgaaatggactcattgtttctgctatctctctcttttgtgaataagaggtaatgcatctataaaaccatgatataaatttaaacaaaacgaagcgttactaaagagaaatatttatgagagttatttagttattgacgaccgagtcatcgttgtgtttgtgtatagtagtttcattttgaattaatttttctctctctccctctctctctctagaagtcatctatactattatttgagcaatgttaaaaataactttaacctggattgatgtgttagaga

SEQ ID NO: 50668 - DNA, 201 bp, Arabidopsis thaliana columbia
ctccttctccagtctccgctggtttctatacaaaactcctcaggccattccgccgcaagcttcttccggaaacgccaccgggaaaccccttggaactcatttctttgaattttcactggatggtcaccggccggcaagaagttacgatggttctctatatgctcaaaaaccaaattattttttcaacatttttggctactt

SEQ ID NO: 50669 - DNA, 505 bp, Arabidopsis thaliana
cggtcctttaccaccggtcaatcacaatttctagtcatccaagactaaatcgggcctaatctattgcaccaagccaccaatcaactttaattatccataaaacgacactatctattggcagaagcttcattagtctttttcttcgtgagaccctttgaaacgaggacggaggaagtttcctttgaataatgcagcattttcaacatagaaaattctccaaacgcaacgcagaaatgacctctgctttctccaacgtcaaacttgtttagttttatctatgtcatctctctaattctcttgtaaatctcaataatacctcttcacttaatctttttaatatttctgttttggatggtgaggatttgtgttttcatggttttgttgttgttcttcgctccttctccagtctccgctggtttctatacaaactcctcagccattccgccgcagcttctccgaaacgccaccgggaacccctggaactcattcttgaatttcactggat

SEQ ID NO: 50670 - DNA, 518 bp, Arabidopsis thaliana columbia
tagtaacgtggataccatcaaatcaaagtctctctctacaccaggattgttattatagactaactgaagaagacgagagagaacacaacaaagagatgaatctttatgcaacaaacaatggcaattccaaatgttaagtcatttggtctttcgtttgtgccgtgtgctgaagtcagatagttttacatcctagttgacacaggtaatgtcattcattagcaatttggtaggtttgagtctttatcaaagtcaaatgaagtccacggcgatgaactctgactgtcaaccaaccaggataagccacgtatacaaccatatatgtcaaatacttgagtaacacaatgcttttcctacaccaggatttgttgttgttacagattcattcaactgcaaaaatagagaatacaacaaagagagaatctgtctgaaagtgaaaacgtctgcaacaaacaatggctattccaaatgttaagactttgactttagagtcccgaattgacagaggaccagagagacat

SEQ ID NO: 50671 - DNA, 866 bp, Arabidopsis thaliana
ttaactgtaggatcatttgccataaacatacaaatacgtccatggattggtcctatccctgtgattatcccacctgaaggcaaaggctcctcatacaattcatgtcctgcaagctgcaaacatattcatatccagtaagcagcaacatcaaacaagtttttaatcaatgccaattccctaatcttcttttgttttcctaacttatgcaagtactaatcaacaataaactctagattgcaaatgtgcattaaatccaaacaaagaaacaaaacaaaacctgagagagctccaaaaaggaagaaccaggatcaagtagccgatcaatcctttctctaggcaaaagcttgtttctgcttctgttcctcttaaccgcttcctctccacctccggccaatacctacaaatctccaccgagatacacttatatcattcatctgcaaacaattaagacatcaatcgataaatgagatggctttacctttttgatatgggaacgaagctccgataagatcccttccatggcgatcgaattgctagaaaaagcctccgaatttctgtcgactccgtccggtaaaatgcccacgcagaaacccttttgtagtccccggaaagttcgaaaaggatcgggacgagaatcggttcctggtcggatccgccattgttgaatactagtaagctctttcgaagctgaaacaactcttctccccaaaatccttaacattttcgtctcactgtctctcgaaaccgatttcacttaaaagacatatttatacacactgttgtgactgactacttgattgtctgtaattcatatctcgaaccaaagagaaaagaggagataagctcaatgaaacaaaaatactatt

SEQ ID NO: 50672 - DNA, 494 bp, Arabidopsis thaliana columbia
cagaatgctgaataggatgcacaaactctcttctttaaaactgagaaatgcaatgagagaagaatgtaaggaacatgacaagagacaaatccttgattcaaaggcttcataatagaaacaaaccgattgtgtgtcaatagtgagactgcactacaaatatgtcacatgaggaagagcagtaactgaaactgaaaaatcgaaatgtctagaacacatctaccaccattctattctacattcacattcctcaataactggtacaaaagagataagctgtttcttaaaatcatccttgagagagtcagagattatttaagaatgacgatatacttagttggcctattcttagtttgagagctctgagtgtagcaagacgagacagctcaaaacagaaatgaatcacctataaggtctcaaccatcaactgaataactagaaaggcaagcatatattgagtaagtctctaaactcactaaaaagaagttaatcagaga

SEQ ID NO: 50673 - DNA, 1318 bp, Arabidopsis thaliana columbia
tctggagttgggagtgttgacgtttgcgtttaatgcaggtctatgaacatggttttggtataaacaaagttcctaaaagcctcttggatgggtcaagcattctgactttgggattccctgactgtgaaagctctcaccttttgctaatggagctcgaaaaggacttcacaccattgtttaaattactggaaactcagatggatggttcgggaaaacctcagtctttcaatgatccaagcaatattttgcgagctaagaaaattgatatagggcagatacggattctcgaagatgatcttaacttgattacatccgatgtggttaaatttgtatcttcattctcggatgctgagggcataaatcaagcatctggacaccgtcagcctggattggttgacgaggctttgacagaaatgagtggaagccagttgagtttctctagtgtcgtagatggagtgtttggacttcagaaagtgacatctgctcttatgtcaattgatggacatggtttagttcccaaaaatctctctgctgttaccggccatggaaaagctccaatgttgactagctatcattcagattccttgtataatcgacagggtcccttacaatctagctcttataatatgttatcatctccccctgggaagggttcagctatgaagaagatagccatctctaactctgaccaggagttatccctgatactgtctccatccctctctactgggaatggagtctctgagtcaggctctagactggtcactgaatcctcattgtcacctcttcccctatgtaagaacatttttccatagcctttttttttaccttcatagaactttctcaatattagaattcaaaaatttccgttatttgcagctcaaacagctgatcttgcaacatcatctgctggtcctttgttaaggaaagatcagaagccccggaaacgttcagcttcagatttgctaagattgatcccatccctccaggtagtggaaggtgttgctagtcccaataagagaagaaaaacctctgaactggtacagagtgaattagtgaagagttggagccctgcatcacagaccttatccactgccgtgtcaacatcaacaaaaactataggatgcagctatgggaatctcatagctgaagcaaacaaggggaatgcaccttcaagcgtttttgtttatgctcttctccatgtggtcaggcattcttcgttgtccataaagcatgccaaactaactagtcagatggaggcattggatatcaatatgttgaggaaatgggactaagagatgcattttcagatatatgg

SEQ ID NO: 50674 - DNA, 1085 bp, Arabidopsis thaliana
tggatattctggccagatctttggatttgggagcagtggagggccggtttgttctgcatcccaagtgtttggctcctatgatcactcatttgagttttgcagatgatattttggttttctgtgatgggtctctgtcttctcttgctgccatcctggatattctagatgtgtttaagaaaggttcgggccttggaattaatctgcagaagacggccttacttttagatggtggtaactttgaaaggaatcggattaaggcagctagtcttggtgtttcacaaggttctctgcctgtccgttatttaggcttgcctcttatgtcccaaaaaatgaaaaagcacgattaccagcctcttgtggataggataaattcaaggttctcgtcttggactgcaaggcacctctcctttgcgggtagattgcagctcttgaaatctgttatttactccacaatcaacttctgggcttcgatatttatcctccccaaccaatgccttcataagttagagcagttgtgcaacgcgttcttatggtccggagctccaaactcagctcgtggtgcaaaaatctcttgggatatagtgtgttcttctaaggaaagtggtggattgggtttaaaaagattatcttcttggaataaggtcctggctctcaagctgatttggctgttgtttactgcttcgggttccttatgggtctcttgggttcggttgcatctaatcggccgtaggaacttttggaatcttaatccctatctctcgggcagctgggtttggaggaagctctgtaaacttagagaagttgctcgtccttttgttatttgcgaagttggttcaggaatcactgctagcttttggcaggataactggacaggtcatggaccgcttatacacttaacggggttgaccggtcctcagctggttgggctttccattacctctgttgtcagggacgccattaggaacgatgactggtggattgcctctagtagaagcaggaatccggttattcttcttctgaaatctcttcttcctcctgttgggaatttggttgattgtgagcatgatgactcttatctttggaaa

SEQ ID NO: 50675 - DNA, 1125 bp, Arabidopsis thaliana
tgaggcaataaaaacaagtgacagaaaaaggttggagagctctccaagtatccgctgtagaaaactttgaagaaggcactcgatcacccactttccaaagataagagtcatcatgctcacaatcaaccaaattcccaacaggaggaagaagagatttcagaagaagaataaccggattcctgcttctactagaggcaatccaccagtcatcgttcctaatggcgtccctgacaacagaggtaatggaaagcccaaccagctgaggaccggtcaaccccgttaagtgtataagcggtccatgacctgtccaattatcctgccaaaacctagcagtgattcctgaaccaacttcgcaaataacaaaaggacgagcaacttctctaagtttacagagcttcctccaaacccagctgcccgaaagatagggattaagatttcaaaagttcctacggccgagtagatgcaaccggacccaagagacccataaggaacccgaagcagtaaacaacagccaaatcagcttgagagcaaggaccttattccaagaagataatctttttaaacccaatccaccactctccttagaagaacacactatatcccaagagatttttgcttcacgagctgagtttggagctccggaccataagaacgcgttgcacatctgctctaacttatgaaggcattggttggggaggataaatatcgaagcccaaaagttgattgtggagtaaataacagatttcaagagctgcaatctaccagcaaaggagaggtgccttgcagtccaagacgtgaaccttgaatttatcctatccacaagaggctggtaatcgtgctttttcattttttgggacataagaggcactcctaaataacggacaggcagagaaccttgtgaaacaccaagactagctgccataatccgattcctttcaaagttaccaccatctaaaagtaaggccgtcttctgcagattaattccaaggcccgaacctttcttaaacacgtctagaatatccaggatggcaacaagagaagacagagacccatctacagaaaccaaaatatcatctgcaaaactcaaatgagtgatcataggagcaaacacttgggatgcagaca

SEQ ID NO: 50676 - DNA, 527 bp, Arabidopsis thaliana
cgcttgaacttctgctctgtgttttatcgacgatccatgctttctaactaacacaaaggagtgatcagccacgacatgcgcattcgttataatcttccttccagaaatcacaaatcctaaatcaacaccaaacagaaaattcaatctaaaaatcaccaaaatcacacttgaagcaattccaaagagactaagtattaccagagcccatagattctcgttgagacttattctgccaaggaagaaagtaactaggacttgtagaaacagtaaagatcttcaccactgagtctaacgccaaatcaaccgcatccgccgccggcgagattgataatgattttcccgccttcctccgccgtgaaatctttctgttattaaccctccgtgaagaaaccggtgatgatagagtcgtgtgtcgattctcattttgcgaattcgcgctctgagaagaacagaatcgagagatgtgtgaagggaaaggactctctgttgttgttacctgtgtggtaaatagctttggaagccattgc

SEQ ID NO: 50677 - DNA, 635 bp, Arabidopsis thaliana
ctattggagatgtgtctcagaagatgaaatagaaggtatcttgcagcactgtcatggttccagctatggcggccatttcgcaacattcaagacagtatctaaaattttacaagcagaattttggtggccaaccatgttcaaagacggtcaagagttcatttcaaaatgcgattcgtgtcagagaaggggaaacataagcagaagaaatgagatccctcataacccgactttagaggttgagatttttgacgtatggggaattgatttcatgggttcgtttccgtccttgtatgggaataagtatatattggttgcagtagactatgtgtcaaaatgggtggaagcaatagccagccctacgaatgatgctagagtcgtcctgaagttattcaagagcatcatcttcccaagatttggagttcctagaatagtcattagtgatggaggcacgcactttgtcaacaaagttttcgagagtttactgaggaagaatggggttaaacacaaggtagcgactccttaccacccatagacaagtgcccaggtggaaatctctaacagggagataaaatcgattctagagaaagctgttgggaacaccaggagagataaactgaaaaactgcagaagaaaag

SEQ ID NO: 50678 - DNA, 892 bp, Arabidopsis thaliana columbia
gtcatagagcgtctcggggcgtacaaaccctagatacaatttcgattgtgcgagtttcgactctcacagagacaaaaatggtccctctaatgaattggtcgagtaacaggggactcttagagaaaggactgaactttagaagaatgctaaaggtaagagcccacggacacatactctacccttagatgtatagtatgatagctcagaagatgatctcagtcccttagatgtcttaactctacccttattctcattctttctctcttttggttcaagttctgaggatgtttctttaaaacgattcaaaagtctagcggtttggtcttaaactttggtaaacttaaggcttttcttctaaacttatagcatagagggcgttttacccttctctttgaattacaatgcctaactctgtttgagttccaaactctttactagactaacactttctttagtatctcccttgagaactctaaactcttactctcatttttatctttgtttcttttcattctcattatcttttccattcattccatacacaatcctaatcccaaatacaagtctcaccttgtcctacctaacccaaaaagcgtgggctaggtctacatgaaagactgctcttgtcggctcatacctaacacgttataccaaactcaatctaaaaaagaactcacaatcacacatgatatgtctataatttgcatgatttaggcattcattcttcaccactttgtcattgtttcatccacatttcatctcattaggagtcgttttagtgtgttttgcatacttaggacggtttttcattaggattgcatgtgcattgcatatttggttgtttcaagtactttggatgctttttgagtcaaacaaaggagaaacagaatag

SEQ ID NO: 50679 - DNA, 702 bp, Arabidopsis thaliana columbia
acttcacatcgtattactttagtccaagcgtagaaccaaaaagactcgtcctcgacgatatgatgatggaggcattgcacctacatataactttcttaatattctagatacctttgcccaaataggtagactcgcagaaaagttgaaagaagtttggtgggacgaccatgcgctttctcgactagctcacaattatatactccgaaatgttgattacattaaaaaatttgaaaggtataaagccacacaaattttattcataatttttaatatttaataattagtgtgatactaattaaagaagctaagcatcaacgttttaatttgtaggttatttgattcacaaatccgttaagcatgtcctggattataagaaaaaagtataaaacttacaaagatcgtgattttgctggatggttaaaatactatgtaaataatatttggaaaatttgatatcttaattactacaagatgaaatgataaacttaattaacatttaatttatgtaggttactaacggatgtagaaataaacctttaccactttggttgcatgagatcgttcaataaccaagatctaagatcacaaccgcacctatgtacttcactcgcggctatacctttcatacgtatccatatggaagtcgaagagcaactgcaaattatggaatccgatgtcgaggtgaaactgagttttatggga

SEQ ID NO: 50680 - DNA, 589 bp, Arabidopsis thaliana columbia
  unsure (1)..(589): unsure at all n locations
tttattagcaatagattaattattgtaaattatgaaaactattatatatccaattcttccacggacaattcttttcaaccattattagatccacgagagatgacacctcattcttcttcttcatgctctccattattagatccacgagagacgacacctccttctccttcttcatgctcttgatggtcaccttcaatgatcctctctgtatagaatcctggcgatcgtctataattatacatcgttggagatctcttgcacacttacctcctttaatctgaaaatctgctaataattcgcaatatcttggatacgtactgtagatatcttgatgtagaaacatcaatgaagcattggtcaaccaatagactaagggtttcacacttgccaaaatatctcaatagcaaaaataaacaacattccaaaataactgtaagaaatattttttttttttttccaaaatagctaagtagcaaaataaacaacatatcaaaataactactaactagcaaaagtagaagacactccaacatgactcactagccanaataattaatatcccaatagtttaatataaattaagattaat

SEQ ID NO: 50681 - DNA, 626 bp, Arabidopsis thaliana
gacaatccatcaaccagccgggctcttgtcatcaatctcctcgccatatcccttcatgcgatggtcaatggatataatcggacctatgcatccctcgaagcaaaaaaagttagtcctcgttctaaccgactatttctctaaatggatagaagccgaatcttacgccagcataaaggacgctcaagtcgataacttcgtgtggaaacatatcttatgtcgccacggaataccgtatgagattgttacggataacggctcgcagtttatatcgacccgtttccaaggcttttgtgataaatggggaattcgacttagcaaatcaacgccacgatatccccaagggaacggccaagccgaggccgcaaacaaaacgatcctcgatggcttaaagaaacggctcgatgctaaaaagggctcgtggtccgacgaactcgaaggcgtgctttggtcgcatcggacaactcctcgccgagccacaggagaaacccctttcgccttagtatacgagacagaatgcataattccggccgagatgatagttccaagcctacgacgaagcctatcccccgagaacactcctgataactctcaaaggctcctcgacgaactcgatctgattgacgaac

SEQ ID NO: 50682 - DNA, 562 bp, Arabidopsis thaliana
tgactcttctagccaatggattttatggcttgcattttaaatctaggataccatttgagagtgccaaaagcgtttttgatgacgaagccatgaagacttatccaggcggtcggtcagcatttgaagcccttgttgattctataaagttgaagaggcctattggcaagtcgtacaccatcagtggtattgctttcgtgttacaggcttgggcgtatgattcaatcaacaccattggagagcgatatgggaacgtaatcaaagaggatgagattctgttgcttagatggggtgtcaaccgtacccgtgcaataatggaatcgaccattgctgaagatatcacagcgcatggtagtgaggtaaagttttggctctgttatgatagttacttactgagttatgttttgtgatggctgagttatgttttgtgatggatgtgttattgtttattgatggttgagtgatactttagtaatgacttggttgtggtttagtgatggtggaatcatagttgagcaatgtctgcgttatacgttattgatgactgactgtagacatactgatg

SEQ ID NO: 50683 - DNA, 529 bp, Arabidopsis thaliana
tgagctttagggaataaatgagtttaattaacataccgccattgttgtcttctgtgcaagtactttgggtgactcatagagcgggcgcaagacctcaggcacgctacaagcctatttaagtgaacaaatatccaaacagtttggttaacatttccaagaccattagaattggtgcagagtgaggctcgttacctccaaatccatatgatccactatgtgtatgattgagccaccaccatcacaaggccgtatcaagtacccactggaaagcatctctgctctcacaaaattctgaaccagtggcatactaggaccattttgagtgctcttaagagatctctcgcacacctataagatttcttaaaccttgtgaaatggatcaacatgaataagaacactgacagaaaagaaaagctacataccacaaggctgccatcttctaaaacagaggtgtaacgtaacagccagaaatcgcgtggtggggccaatgtagttggtgcatagagctgcaattacgaagaggatgatg

SEQ ID NO: 50684 - DNA, 743 bp, Arabidopsis thaliana columbia
gtcgactctagactcagcctttgtggggtgtcgatcgacacaggtggtggtgttgatcaacaccattgctgcagatgattcccatcaactgcttcgtcagctgcgtcttgtggttgcttgcttgtaccatgaacatagctatctcaacatcaatccattgttcattgacactatcatctgttgttgacgctttggtgttgagcttgctcgatttcgctccttcaaacgttgaatcatggtctgttcctgatgagtgtcgattgacaccaaggtcgtgttggtcaacactgagacttggtgttgagtggttatgtaaataagtgtcgcaagcagtcgtgtggggtttctcagaggtctggtgctgaatttcactccttgactgaactacaataacatcctctttgttgaatcgagcattcaagtcttgtatatcatcatacagaccatcaatcctttcattcgtcatcacttggctcttgagaatctattatagcatgtattccatcatactcgtagaagtgggtggagggtgggcttggtgagtagaatagctggaatgactagcgatagacatatctggcgtgttgtagtatcaagttgaatagcacgtccatttgcaatagttgcagctctatatcctctttggtgtcgagcgacacctaggtggtgtcgaattgaggaagtgcaagcctagtatggtggatatgacagcctttagaatgaactattgggtgttcagacag

SEQ ID NO: 50685 - DNA, 579 bp, Arabidopsis thaliana columbia
caactagtcatttcaggttccttcattctccttagctgtttcgcccttcttttttttaatgttttttagagacatgggagggaaccggtgctaaccaaatgtgcatcaggaaaaactcaaacagtataacatgtcatacccatgacgtacaagtatacaacctctaaaccataatggccaattttcatcacatatgaataacaaataaactacattagaccatccttaatggtgggatataagttaaggtttttaaccatatttaatgaataatttttttgaaattttgttgttaagagttttggtaagtttttaatttttggcaacctcaatggtagtatattaaattagggttcttaaaaaaatgtaatttcaaaataaaatatagaaatattttaatttttaacaacttaatcattattgaattcataatatttgatacatagatgacataaaaaaattaaaacatacatgaaaacataaaatttaactattgatttctgctaaattgttttcatatatgttcaaccaaatcagatttcaattgttgatgtgcatgtcgatcacgaatttgagttc

SEQ ID NO: 50686 - DNA, 603 bp, Arabidopsis thaliana
taaacttagatcaaaagttctacactcaacaacattgattaaagttttcaaaatttaataccttttccaaggaattcaagtaatcaacagctctttctctgttcaccatgaaagtatgttcatccatttcgatattcggcgaacccctaaaatcaaaatcaaactccaaaatcaataaacgaaaacagagcataaacccaaaaactccatcaatcaaaatcgagattaggaatactcactttccccaccaaagctcatcctcagtagtagcatctctaacaacacgcttatctctgggagcacgaccagtcttagcaccagaaagcgtcgccaaagctccattagaagtgataaacgaacctttctcatacttaatagcttgctcataaagctctacaaacaacaaaatcacaaaccaaatctatcaaactcgttgcagaaacatttatcaatattcagattcggattctaggtttatttgttgacctgcaggcgaaagattgtagaggacgtgagtaaacttcaaggagctatcactgacagcaccagtagccggagaaaagatagaatgatgttggccgtgagcgtaccgcggagtagttg

SEQ ID NO: 50687 - DNA, 619 bp, Arabidopsis thaliana columbia
ggatagatatattaatcaattttattggttgaactaataatatgatgacacctgtccaaattggatgagaatagtttctcaaagtttctcctcccagaaacttaactctccttctctcctactttttctcacctctctcatactttttttttttgaaattttttttttgttgggtatctcattgagatacttccaatggagatgctcttaggtctaaacaatgacctttaaaatatatatatatatatatgacctaagaaacgtgatgggccttctttagaaataagggaaagttctgggccaaatttggaaatcttcaaaacttcaataagttgcgtctttgaattgccgtcaggtattagtgtcgttcgacacctacgcgagttttagtattcggatgtcttctacagcataaagtctttgttgtctccagaatgctctattatctccaaatgaatcccagacatgtaaagacctgtaaaacactagaaaagactctagaaataacaaaaagactcaaaatcctatatctaaaacatagttaaaacagtaaaaatagggttatatcaactccccagacttagctcttgcttgccctcaagcaaaacacaaaagctgg

SEQ ID NO: 50688 - DNA, 1441 bp, Arabidopsis thaliana
tttctcttgcaagctcttgacagattcgtaaagagattgcttgatgggtttaaattccaagcctaagtcttttatcttttgggtagtaaacttgtatggcttagcctcggattcttctcgtccgaacacctagtaacattaaaacaaacaatacttttgttaatcagcagaatacgaaatgtgaaaaggatttcttgtatatcactttgaagtaacgttttaattattaaactaactaaaggagacacacaagtcatgaaactagtgaccaaatattggagtaggtgaagaaaaaacattcacacccccgtacgtgtttgtcaaatggaatttgacccaaacacgtgtactataagatcttgtaagatttcaacgtcagcagtaggtgacagatgacatggactttgtgatgtgagagttagtacacaccaatctcaccacaaccacaagtgctcatttttaaaacatatgggacatgggacaagagtcacaataataccaaataccactcatgtcccttttatcctaactaaatatttataatttttttgaatagatatgttcaagttctccaagtcataatttttgtggtgtgtcaaaaacaaaactgaaatagtttgtaaaccaaaggttgtatttattagaccgactaaaactaaatcgtgttgactttgatattttttgaccaaagtgttcaaaagagccaaacttgacttacttggtgggaagtggatactccgggaagaatttggccagaatctcaacaacctctccgcggtgaagtgcggtctcggcgaggatgtaacggcctgagcggagggtgcttcgtagaccagaacatggcctagtgccacgtcacggacgtccacgtagacctgagtcaagttagcgtaggtcttggctgagccggtgaggtacttgagaatatggactagactagcgttgatcgctgactggagcggtggtccgagaaccaaaaccggatttagcaccactaagtccacaccttttgctttggccgtctcccatgccgattgttccgccaacatcttcccgtagcaataccaattctataaggaagataaaacaaagaggaaatttaacctaattctagccgcatgctcgattttattgcagaaaactctttgttaaagacttagcagcgcatctcgaaaacttatagcatagataaaaaaaacaataccttagtgtttttgcagaaatcaagatcactccagcagttttcgtcaacaatggcttgagtgtcacggttagggttcatgtaaactgcaccaattgatgacgtgaaaacacgcgcttgaccttggctttagcgctgcgtcaatcacgaacttggctccgttcaccgccggctccaacattgtctcctaattagttacattaattctagacctgaaaactaagacaacatgagtactat

SEQ ID NO: 50689 - DNA, 953 bp, Arabidopsis thaliana columbia
gtgtaatttcaagtagatagtatatgtgcacagacacgaagcagcttacatataaagtgattggtaattgccatccccacacttattgagaagtgcagccttttagccaaaaaaaacaaacaagaatacaaaaatggctgaacaacaagatcatcacaaagagcttcagcttttaccttctccaccgtctaccgaatctccggtaaggaaacaccgaccaacagttataacaaccgaccatcacaacaatcaccaccgttcctcctccatgatccaccacgatcttgacctcaaactctccatcagcctcagctcgatctcaacagcggaggagcttccaaacggtggtgtggaggcgttgaagtggcaagccgcggacgagataaggcttgcggctatagagaaggcttacgccgagagggttagagagttgactcgccgtgagatggagatggctcagtctgagtttgctcgtgcaaggtagttaaagctagctcgatcaagtaataattctggttttggtttggttaacggttttgaattgtaaccagggtgatgtggcagaaggcaagggaagaagtggagagagctgagagattgaaggagagatcaatgacgaagatcgatacggcttgcttggagatcacttgccactcttgcagacaaaggtttaggccataacataagtatttatttgtttctcttaattattgttattataaatggatatttgaagagaaagagaatgttggtttaatttaaattttattttgtagttaaatttaatttgttgtcattttcgagtttggtaatattatatagtccttcctttttattttcttgaaatcgaaggaaaacaatatgctcagataagagatgatttatgtttccagctactttacttcctcttctttgccaaccaaaaaaaaaaaaaaataaaatcatgaatacca

SEQ ID NO: 50690 - DNA, 825 bp, Arabidopsis thaliana
cttctttttcttttttgtttcagtttcaggagtcacattactactgcttgctttgtggggtcacattactactgcttgcttgttcaccaaatgtaaacgttgttggttgatgcaaagccgatttagacttgcttaagttctccttatttcctccctcggggcttctattcccgttatccgacctccattttcgcaactcgtgatccataccaaccttcccatctctagctttctcaacttttgtcattgcttcttttagctctacctttcttatagctgtttctctactcacttcctctagattttccaagattcttgattcctcttccttagccacctcgattttggagacgatctccgctagttttctattagctgcctcttctacctcatgtgcttgcttgcttagctcataatattcctccactgaaattattatgctttttggagaactactaatgtcttcgattttgttagcatattcagtctcttgcaatgcttttattgcagctaaagctaacttctcagaagctcttgaagcttccaattccctttttcgactccattaactgtctttctaccgcagagagtcctgttttcgcttcatcggactcttccttcgcctttcttagctcctctcgagcagctatcgcaagtgactttgcctcctctgcctccctgctagcttcttgcaacttcttagctatctctgtgcatttctcctctcttgtgtcttctctgtttctctgtcttgtttccgataaatcatgcttctctctcgcgagttcagactgcaatgatccgacaattatcttcaaagttttc

SEQ ID NO: 50691 - DNA, 582 bp, Arabidopsis thaliana
tatataggtaccagaagtcggtacacctatacggtctttaacggttatgtgggatgggacaatggtggttgctgctaacgaccgtggaacatgttatgtatggcgctccttgtgtgaaagacaagtactgttctaatcataagaaaaactttctttcttccattatgctgaaataattgttcatgtcatttaaaaatttgattgtgttttttgctagacgatgaccgagtttgagccccttcataagctacaagctcataatagccacatccttaaatgtctcctttctcctggaaacaagtaattatgtgtttcttcttctttctcttgcaacctgttttctttgtcttctttctttttgtaaggtcttatatatttgttagcagatatctagcgaccgcatcatctgataaaacagtcaaaatatggaaccttgatggtttcaaacttgagaaagttttaacaggtatatggtctctccgtgtttctgaaaggggtatgtgttctcttttacactctcatcaatatcatttaacaggtcatgaaagatgggtatgggactgtgacttctcaatggatgga

SEQ ID NO: 50692 - DNA, 748 bp, Arabidopsis thaliana columbia
ttcctcaagtccgaccgttctatagatattttcctcgtttttgcaaactgcaacattgtacttccagctatcgactgcacataatctggatccccacatgattgcacgtctgcaggactcgtgccaggaggaactctttgaccagactcagcacccccaattctttcgtaatgctttccaggtggtattcggctcttctcacttctaacagaatgagcatctgaaagtaagaataaaaagctgtgccaaatgatccaacgttgttgcatgcaaaattgcacataacaaagtaaaatactcgtaaaatatacaactaagacaggctctcatcacaaaagaagccaatactacaaatccaattaactgtcatttcagtcaaacacataccatcagtcttatctagcacctcgcaacctaatccaagatgaggcccttgccttgagctccgtacctgactcttttgcctcctccgtctgaattttttggaactgtcacatattgaagaatttttatggtctcacacagatgctggaaagataataaaaggcaacatataggccagataacttacgaaaaaaagaaagtttgctgctttgggtcaacgtcatcctcattaacctgagcagattttttaatgaacattaacatttagaagactgtgctcagagtaatcatcatataggaaaactacaaagacatagaatatattgtagaacagctacttcaattagatttgacactcctatat

SEQ ID NO: 50693 - DNA, 1245 bp, Arabidopsis thaliana columbia
ccaatttctgggtcgccaaggggtaagtaaggtttcatcaatttgcgttttcggatttttgttttctctcttgatccagattctgaaattgagttttactgtgttgtttccgcagaattggcttcagctggattttttttttttttttttcctgagaagcttccgatgatttaggggttagtgcgatttaggtctcttcctgtaatttttcgcgattctctgtataatttgtgtggttggtgtgaggagaatcttggaattgggaatggaatctccgatcaaatgttgcgactgtggatgcgattgttgttcttcctcccctggttcatggattcgatctgtgaagaagagaagacacgacgaattacagaccgagaaacgattctcgataccggagctggacgacctagacatgttctctaatcctagagtccaaattgagaacgaatgtgaattactacgcgagactgttagcaatcaacagcaaacgattcaggatttgtatcatgagcttgagcaagagcgtattgcttcatcaactgctgcagatgaaacagtaaagatgattcagacgttggagcgtgaaaaagcaaaaatcgacttggaactgaaacagcttcagcgtagtgttgacgaaacattgaattatgaaaaccaagagattgaggcattggaaaatatggtttatcaaagggatcagacgattcaggctcttacgtttgaaactcaggcttataagcacagaatgatgagttttgggctaaccgaagcagaagctgatggtgagaggagcttgcttagtcgtaacccgagcatgatcgactttagttctgaatatgactgccctacacaagattaccctcctcttaaatgcaatattaatgagaaccaagaccctcttgaggctgatatctatgttgcagatgatgagaactatccaccagctgattctcctcatgggagagtacatttaaagactttggatcgaagactcagccagatggagacgaatcctagctttactcagttgaatagagggagggatgtttcagagaaggggatggttggtgagagtcctaggcgtcaaagacattttaggaggatttcccctactggttcatcaagttcacacttgggagcatctaaagaactaagacctgatgtttttgttgattccccgaggtcccaaagctacagctctaagaaaatggaagatgtctcgtatacagaggggatcgtatcctc

SEQ ID NO: 50694 - DNA, 1097 bp, Arabidopsis thaliana
gttatagcatttaaaaaaaatgttgtcaagcaaagttgttggcgactctcatggacaagactcatcctacttccttggatggcaagaatacgagaagaatcctttccacgagtcgtttaacactagtgggattgttcaaatgggtcttgctgaaaaccaggtttgtatcaatgaatctactaactattttaactcatagagaacaaaactagtatgtacacaatttccaaacttttgtttatcggttgttgtttccgttctttttgcagctttcttttgacctaatagagaaatggcttgaagagcatccagaagtcttgggtttgaagaaaaatgatgagtcggtgtttagacaattagctctgttccaagattaccatggcttgccagctttcaaggatgtaagtaacatattgggagtgtttaaacaaagtctcagtttagtttaactttaacggaaacaaataatcgatagggttttgatatttcgaattcaaaagatcgaaaattcgcgtgtggttatttttttatttattattattattctttttggattcggtttttcggatatataaaaagagagtaaacattataggagtagagtcaaactatgatactaaatattctatggttttacacaacaggccatggcgaagttcatggggaaaatcagagagaacaaagtgaaattcgatacgaacaagatggttcttacagctggatcaaccttcggctaacgagactctaatgttctgtcttgctaatccaggagatgcctttcttatccctgcaccttattatccagggtacgtgtatatttttacactaacgtttctgaatatgttagtgttatttacaagagagactaaatttgttttttgttttttgtcatcatgaaggtttgatagagatctcaaatggaggacaggagtagagattgttcctatccattgcgtaacgtcaaatgggtacaagataaccgaggatgcattagaagatgcctacgaacgagctctcaaacataacctaaatgttaaaggagttctcataaccaacccttcaaacccacttggaacctctaccaccccgtgaagagc

SEQ ID NO: 50695 - DNA, 718 bp, Arabidopsis thaliana
ctgttgcgtcttgtgtaagaactgatgtgtttcctgtcgatttgaagaatcttttcttcttcgtctgtggctgagaatgtctccctgtgagcagggtacagtctgttgttgtcgcttgccttcgaaccattcctctgaaaatttaatccaatctcttagtttaaatggaatgtgaaatggataagtctaacaaaggaacaatgagaagcctataaaccaattcttgagattggatttgttttgaacataaagcaatgtcagtaacttgtatagtctctgaaattttgaactaatgggaccacaagcaacaaaaacagaagaaacaaacagcaactgaaaatgtaataccttgaaaagatgagaatgagcgagtttggagctgcgagaagagatcgaatgctcgagtttttccggagttggtggacccttaaagaaaaacagaggagttgttaaaaagggaccttgaacgaaaagacatgttttaggttaaaaggaacaatcatagggaattttacaaggcttacagggttttggaagtgagaagatttggtattgttggattgagaagaagaagattcaggcgtgacaataacccgagtggcacgcacacgagcctgagctcgaaccaaagcgtgcgtcctgcgcagatggactgacattctctatcgttcgataatggctctaactatcgcttggagcctaaccagacccttgagtg

SEQ ID NO: 50696 - DNA, 835 bp, Arabidopsis thaliana columbia
acaaagttcttagtgtcttcacagctatcttcagattctccagcgtctcctgtgataatcagcatcgcaccacgagagatcgaatcgagccactgcaataagaacgacacatcagtaaccagtaaagagaaccccaggcgaatcacgtatcaaatagtgaagtaatcgcaattaccggacattccagctttgagacaaccagcaatcacctcgacggatcgagatttcggacctagagtcccaacaatcttagtcaaagccgggaagaaactctgcgaaataacatcaagcggatcaaaaaccacgacaaacgaaacaaatctctcactgcttcaaaatggatgaaatatcgcaacagatccaaacgtaatcgataatcaacaacgagctaaggaaatcaaaacaaccacagaaaacacacagagcgagagaaggagaaataaatagctcactgatttagaaggttcgaggattgaagtcatcctgatcggttcctcgagaaggagatgacttgaatgcatagttgctgatcagaattcggagatctcaggctttattcgacggtgacgggagaaagacggagaagaattttggagtggagaagaggcggagaaaagttcgcgtgattgggtatttgatacgcttgaccggcgaatatgcctccaaatacgacgcagtttaaatagcacacaataaaatgaaaatgttgaaaaacaagccgcaacgtttgtatcgctctatttaccccccagatgtccaatacctaatgcgaactatccccctgttggtttataatacgctgatgctttaaagttttttttgtcggtttaaatga

SEQ ID NO: 50697 - DNA, 669 bp, Arabidopsis thaliana columbia
gattgaagcggttgaatttttctacttcagattgcttttgtgtttgatatgttactcataatgagattatagccttgaaattatggaggagattcggttatcgccgctgagacagacaagtgttaagtcttcactgtcagggaggtctactccaaggggtacacctagagtgtattctggtaggactccgcgtagaggtcatggtggaggaggagcgtttcagtggtttcgtagtagccggttggtttattggctgcttttgattacgctttggacgtatcttggattttatgttcagtctaggtgggcacatgataatgaaagcaaagttgagtttttacggtttggaggcagaccgagaaaggatgagttatatatggagaagattaaaggactggatgttgttgctaatgagaattctgaggctttggttaatattactggtaaagatgatgctggttcgaataagaggacggatgttagtctgatcaagaaagatgatggggtttctcgacggagcttgagttccaagcagaagacgagaaaaactgtccggacttctcgtagtaagatccgtgttaagcagaaggtgattaaagaggtacttgagactaaggatttggatgatgagcaagatccacaactccattgacaaatgctacttatggt

SEQ ID NO: 50698 - DNA, 584 bp, Arabidopsis thaliana
agactcataattaagtaactgaaaccaaaaggatgaggagacaatgagatgtctgattggatttgttgtgaatggcttataaatgcaggaaaagagaagagaatgtgaaggagccaagagtggtggttcagacaacaagtgatatagacattcttgacgatggctacagatggagaaagtatggtcagaaagtcgtcaagggtaatccaaatccaaggtgtggttttatttttctcttgtcaattctgaatgaaaaggaggcttgaagcttgagctataagttagttaaatttgtgatgtgcaggagctattacaagtgcacatttacaggatgttttgtaaggaaacacgttgaaagagcatttcaagatcccaagtcagtgatcacaacttacgaaggaaaacacaaacaccaaatcccgaccccaagaagaggtccagttttaaggttacttggaaaaacagagacataaagagcaaatgagttttggcatttcagcattcctattgtaatctttcattcatatatagtatgtttcctaatcatgcgcctatacacacataactgatcaggactaggcaga

SEQ ID NO: 50699 - DNA, 642 bp, Arabidopsis thaliana
agatttaggtctaatgacttgaatccaacttttctctggcagtgtcgttcgggccatataaacgagaaacgcattcaaaagcttcatagtgatggacttttgaactcatttgattatgaatcttatgagacatgtgaatcttgtttgttgggaaaaatgactaaagccccgtttactggacacagtgagagggctgatgacttattgggccttgtacatacagatgtatgtgggccaatgagtacaagtgctagaggaaactatcattacttgattacatttactgatgacttcagtagatatagttatgtttatctaatgaaacataaatcggaatcctttgaaaaattcaaggagttccagaatgaagtacaaaatcaacttggcaaatcaattaaggctcttcgatcagatcgtggaggagaatatttgagccaagtttttagtggtcatcttagagaatgtggaattgtttcacagctcacttctccgggaacaccacaatggaatggtgtgtctaaaaggagaaatcgaactttattggatatgtttcgatctatgatgagtcacacagatcttgcaccatccttttggggatatgctctagagacgtgtgcgtttatgctcaacagatgtccatca

SEQ ID NO: 50700 - DNA, 614 bp, Arabidopsis thaliana
ccttagtcatatctaaagccgcttgtccgcgttcttgggacaagagccgtgtaacgagcgtttcgggcatcttcatccgccagtagtaggtcaagagagctggtaaggcgccgaccatcaggatgatcctccaaacgtaatccgcctgtgggacggtggaggctgcaccatccaatatataggctcgggacggaaacttactctcgaaaacagctgagacaagtaacgagacagctcctgcggcaaggatcccaatcccttgcataccgaaaacagctgctatgaaagcaccgcgagtacgtttgttggaatactcggacatgatcgtagccgagagaggatagtcaccaccgatgccaaacccgagccagaagcggaagaagcagagagttaccatgacggttttcgggtctcttccaagggaaagaccagaacaaatggagcatatggtcatgatcaagagagtcaaaccatagactctcttacgtccaagcttgtcaccaagacacccaaagaaaatctgtccgataaacgttccagcgaaggccacaccactcacggccgcagagatgccgtcagggaggcttccgggagaggaggagccaggaacctga

SEQ ID NO: 50701 - DNA, 646 bp, Arabidopsis thaliana
tgaagtaagttcaacacatgctcgaccaactgattccaccaacaactcgaagaagcctccaacttgtcctgaaacctcatgctcgaccaaacaactcaagacgtcagatgattggttagaactcaaggagagctctaaatggcaggacaaagccatacaagagctaacacatattgtgaaagagctgaaggatcaaatcaaggagctcaatggaaaagccaaccaagtaccactcaacatcaaggacgtccctggcgatggagcaactattctggtcagcaaagaaggatgtgaattcacatcagaatggtctagaggagaagactatcttgataaaaaagaagcttactgtgaggacatggctactgagtacccaattgtagacctgtcaagaaaccctaatgagtatgatgatcattctactcaagaaggagaggagacctcatttcctctctacaaccaagtaccactcaacatcaaggacgtccctggcgatggagaaactattctggtcagcaaagaaggatgtgaattcacatcagaattgtctagaggagaagactatcttgataaaaaagaagcatattgtgaggacatggccctgagtaccaaatgtagacatgtaagaaccctaatgagtatgatg

SEQ ID NO: 50702 - DNA, 621 bp, Arabidopsis thaliana
cctaccccaagcgagtactatcaataccttaaggaattgaagtttgagggaacaactcagcttatctgtcagaaactgatggtcttgaagcacttggcgagtaacttgtcttgtttcttgcaccacttctgcagcttgttgttgttcctgtgagcttcactcaagctcttgctctccctcgctggaggtacatgttcactaaaatgatacatcctagtgtcaaactccacttctctatcttcatccatcccatcctcagcagcttcttctataagatcatcctcatccaatggcggatcgttctcatagtagaggtttccaagctcatgcctaaaatcaatgttatctccctttattatgcgtgtaacctcaaggatggggagaaggatgatggctctcttatccgtagagtgctcaaacatgaaacggtgcatgtcgccaaccattgcaaactccaggaactcgcagtgacatagatgctcgatctccagtgcccgtggctcgagttcatcagatgtgattgggactcacaagcgatccgaatcggtgttacaacaccgcctatgcaaatagcgccttgtgctctcttatggttatgtggattagaagaagtcagagaga

SEQ ID NO: 50703 - DNA, 829 bp, Arabidopsis thaliana
tcaacatctgacccaagcttgagaagagtcattccgtggagttcattggaaaccaagtatcgagctcggcaaagaagaacatgtcttcccctacaagttggtgcggattgcgacgatgcttcggatgacagcccagacctgggttgcgactcagaatggatataacccatcaaaagctacatatccgaagggaaattgccctcagacaaatgggaagctcggaaaattaaagctcagtctgcgcgcttcgttctggttgaggagaaactctacaactggcgattatccggacccttaatgacttgcgtggaaaaagtagcggcttgcaaagtcatgaaagaagttcacgaaggcttgtgcgaaaatcattccgggggaagagccatagccatcaaaataaaacgccacgggttcttctggctgacgatgatcaaagattgcaaaaagttctccaaacgatgcaaaaaatgccaaaggcacgcgcaaacgatccatcaaccagcggagctcctgtcatcaatcgcttcgccgtacccattcatgcgttggtcgatggacataatcggacccatgcatccctcgaggcagaagaagtttgttctcgtctttaccaattatttctccaagtggatagaggctgaatcttatgccagcatcaaagacgcccaggttgaaagcttcgtatggaaacacatcttgtgtcgccacgggataccttacgagattgtcacgaacaacggctcgcaattcatatcaacacgctttcaaggcttctgcgacaaatggggaattcgactcagcaagtcacaccgcgatatcccaaggaaac

SEQ ID NO: 50704 - DNA, 799 bp, Arabidopsis thaliana
gaagcgtggaaaaggaatggattcctactctgtgcagctagaagctatcaagaaagcgttcaaaaacaaagaaagcatggtcgaggaaatgaagaaggaactggcgaaaatgaagcattctgtggaagatgcacataagaagaagagcttttggacccttgtttcatctgttacttctctcctcatggctgcttctgttgcttatgctgcttctctcaagtgatcacctgaagctgaagatggtactaccctttaactcattcgagttctcaattttcgctgtttaacttataaaccatttatgtagttgcttatgagctttttactcataactcctctatgtagttggttcaataactatcatgtgaaccttttttcctttcgtatctagctcttctatgtctgtgatttctgctacttttctctcagaacatgtagttgattccagaaactccaataaacttgtttgtttcatattcatatattatgcaatatatatatgacatcttttggtatcaagtttttgtctccacttaggcttgattggttctccctctgcaacccgcaaacgctgcgtttgcgggtggtagtggttgttagcgattggcaccaatcatagaaaccgctagataccgctttggaccgctcgaaatcgccagatttcaaaagctttttcccgcagcgtttgcggttgcgagcggtagcggttagattaaattttttttttttttttaattaattaaaataattatgtcttctatccaaaccctatatatcttattcttattagaaaacctta

SEQ ID NO: 50705 - DNA, 594 bp, Arabidopsis thaliana
cgactctccccgtgtataattaagttcatccggataacgaaaattgagcaaggcaagggagaaagaagttgtcccctcctctctggtaacccgccgccggtcatatagagcgctccgcccgccccagcatatgtataaaacatagcatgttcaaaatctggtaaatacgaaagtcaaaaaggtcttataattgctccagtctgttatcaacagtaccatcaacttctggacttctattttcttattgccaaaccgatgtctcgctgaccttgaacagttgtgttgtgctttttggtggaatggtactgcctcaactgctcgtggcgctatagttgcttgggaagttgtttgctcccctaaatcttctggtgggcttgggctgaaaagattagctgattggaatcagttttttggtttgaagctgatttggctacttttttctcaagacggatctttgtgggtgtcgtggtgtaaaacacacttcatccgtggtagatgcttttggaatgctgatttcagagccactgtgcagctggatttggcgtagtctcgcaaagctccattctcttgctcgcccttttgtgttctgtgaaa

SEQ ID NO: 50706 - DNA, 664 bp, Arabidopsis thaliana columbia
tagtctttaataagggttttggaaatttaaataaaatgtagaactaaatctactatagattgttttatacggttttacattgaatatgaccattttaaccaaactatactacttatttggtttttgaattagtttttaaaattcggttcgattcgggtcagtttgattatagtcccctagactattactatttctatttcaacttatggtataataaagacaatggtaagaacctgagatagctaagtccgttgaaagttgagagaggaaagagcaatgaacgattgcggttgtggttgcagttgaaccgaactgaagagaggcagtgcaggacaagatagtgccaaccgagtttgtggagacagaggagggaagagccctgaccgatatcggcatttggtaagacatagcccacaaagctgcgcctataggataccatccaagctctccgatagctccggctaaacccatagcttctttagtcagtctttccaatacttgctccggtaccggagtggtcatcgtgctatacatctgcaacatgtgtcagagaatgtttcatatatacttgaggcgtaatgataagtgaacattatagattagattcaatccttcaacgtatgctcatgaatagtttaatatgacttaagctaagtgacgaaac

SEQ ID NO: 50707 - DNA, 555 bp, Arabidopsis thaliana
ttacccgagctggagatagaacttctcctgcagttgatggcatggatgtagatgaagctcaacctgttggaagaaatggaatccctagccaagtttcaaatagatcagatttccctgagcttggacagattcggcaattatttcactttagggatcgagtttcctgggagttaccttttctacaaggatgggttgatggctcaaggtcatggtgttgctaatccagtggttactcctactggcagtagtaatcatggcatctcagctccatcctcaacagccagtctggaggctgcagtagcgttattagaaatcccgagtggtgttaacttacatgcggtgtctagaagaggcggggctcaggaacaaacttcacaaccccaattctcgagaactggattaccggaaggtgtatcttctcgtaacactcaacatggaagtgatgcacaacctgtagtaaatagggtccagtctgagcttgctacctcaattgctgcttcggctgcagcagctgctgctgcagaattaccttgtactgtcaaactcagaatgtgg

SEQ ID NO: 50708 - DNA, 541 bp, Arabidopsis thaliana columbia
tgaaatttatatacgctgaaaatatcttcaaaattaaatgcttacagatgtaccataattaaatgatttaatttattaatatataaaactgttcaatgttttttttttgataatttgaatattttttttaggtaagaaaaatatttgattttgatttcatttgtgtaacgcccaaacaatccttactagtgggcctcacgtcctctctctggcctatgggtccacctttgttcgacagtcagtacaccacatttagaggttttaaagacttgttgctcaccttacaaataaccacatgacctttttccatgctttttcctcactcgcatagtttgtcgcccatcctgaaacttatctagcctaagcatgcttaactttggagttctctcaggatgtttgaccgaaaatgatacttgcatttttgtgacataggtagccaaatcaattcttttacacctctccgcatgcgccaccatattcttgaaatcgggatgttcaattcaccccactaacagatcacagcgtcctcgttgcgcaccaa

SEQ ID NO: 50709 - DNA, 1723 bp, Arabidopsis thaliana
ggttcttcgcaggcggtgtccacggtccggttagaccgattcttttaaaacactggaaacagcgtgacctggatatgcctgtttatgaataccttcctaaacacttaaactactatgatttcatgagaagttcaaagttctgtttttgtcccagtgggtatgaggtagctagtcctcgagtcatcgaagccatctactctgagtgtatccccgtcattctctcggttaacttcgtgttaccattcactgatgttcttcgttgggagactttctctgtactggtcgacgtttcagagattccgaggttgaaggagattctcatgtcgatctccaatgagaaatatgaatggcttaaaagtaacttgaggtatgtgaggagacatttcgagcttaacgatcctcctcagagatttgatgcatttcacttgactcttcattccatttggttacgtagacttaacttgaagcttacgtaaggtaaagttctgttagattttgtaactcatatctcagaaatgtagtaaaccttaaaagtctagatagatttgttgttattagttaatgaataaagaattgttgcaactttctaagaaatatagatgatctaaatctttataccatactcgtaattactaactttcaatcatttggttgggacgaagttgagagaaaggcgttccatctgtgatcgaaggatgtcaccaagcgagaaacggtgcggttgtggttgccgttgcggtgtggctgaggctgaggctgtcggttcatccgatccaactgtgtctatttttgtgtcttcattcttgacctcaaggtggattggtctcatctctttcttcactgactccacaaactccatatcgattttgttgccggaaatatctctgacgtaaaaagcattgagagacttttggccttgagtctccacgtctgcacggacaacggttaaaccattctcacgtagtacacgagtgatgtcagagagtaagcctactctgttctctgcgcataactccaacttcacgccctgcattaagccatagaccacacacccaaattgtttaccattcttaaatagaacccaaacagtttggtgaatgttcctctaatattcttctgtctgagacatctcaaagttagtcattgtggattgatctcttctggttaacactagagaaatgttaacatacctcgcaaacgcggcgttctattgcagcctccaagcatttaatcacccgttctttctcgccttccgtgttcaatgcccttccatctatgtgtcttatgaagtattcctacaattttcataccaagatattaacatcaaaccctaagggtctaatggtttcaaggaagctatatatattcttgccctacttgaaaagcatcagctccatcagaccggagagcggcgtgaaagataacgtattgcatatcaaccaaagtacaaattgtatcaaacatgagccttcttcgatccttagatttcactgtgacaatagagtatcctctttcttcgcaattcccaatcgaaactatagttgtcttcctctccttatgatcgcagtactctaacttggacgacaataatgacaacgaagaaggctcacaaaacggttcgtcaaagtctctcacagataacattagctgatgcaaccgtctctccatgttgctattcatactcctcgaacaagtctgtctcttgacttactcttctcactat

SEQ ID NO: 50710 - DNA, 589 bp, Arabidopsis thaliana columbia
ttaaatgtaacaaacaaacacccaataggcaacgacgttaaattgatattaggtttttagtcaattatcctaaaacaccaatcatgtcgttgtagtattttatgttgtcaatccaaatgggtgtgatgctagcaatcaagatgcaatatgagttcatagagtcaagccaaacaataacaggttttggggtttctagtagtcctaagtgaacatgcaggaaacagaaattcaaaaaaaaacagtaaaacactcgaccaacacagctcgttgccaggtactgggcgtggtcgagtgaatggacgagtaacagacagaaaatgtaacagggatactcgagtgcacagtctcttaccagacaaccgggtggtcgagtatcaggtcgagtaacatgcaaaagttgtaaaactaagcaagaggtaacaagatgcagtaaacaatagcaaagtaaacaagaaatcaattagatgagaaattctcgaggatggggtaattgagtaattttgtttccttagttttcaagtgattgacatgctcaataaattatccctagcaacaagttcgatatcaaatctaagtgcgaaacaataga

SEQ ID NO: 50711 - DNA, 893 bp, Arabidopsis thaliana columbia
tcaaactgaactgagtgaaataagcattagggccaatgaatacagaagggatctgacctaatcttaaacacctgactgataagtaggtttttatgcctacttctatgctgaagtgtggtgtgttcagttcaattctaacatgtcgatgcagctataaggggtgtcaatccagtctactgttattgctagcaattaagatgtgtatagaggcaactaagtcaagccagattataatgatggtgggtttctattaacaatcctaaatcaggattcaaacaacaaaaatgggaacttaagagccctacttgatcattgggtcgagtagaactaacatgtgacaaatttaaaaaccaaaatgcaataaaaggtaactaagcaaaatgacacaaataacaggtgaatagaagtgcaatcatggggtgaatacaaataaatctaagaagaatagaagtcctaaggatggattcattgataagggcaactctagggctcatccgtggctaacaggtgaaaggcagaaaccctagacgatagattcaaaaaaacccgcctcaatccactctcgtgacagagacccccataactctaatacttcctaatctcaactctcgttgatgaaacatagcagagcagggtttgagcaacaatctaccaaagccaataagcagactagccaatatcttggtctatagcctacaaatctctagaatctctggaaggtctgaagtagagctagaatcgggaggagctgaacaaacataaccgttcaggttactactttgtacccgtttgaccacaaaaccgagcatcaagtcaaaaatgaaagctcgtacctataggagggataccaaaggagttggttggaccgtggacctcttcactagattctatgg

SEQ ID NO: 50712 - DNA, 718 bp, Arabidopsis thaliana columbia
ccgcaagagattcggtgttttctattgggataaataaactataatcctttgtattccattaacaagaaaaatcaaacctttacatgtataacgacttgtgcaaacgacaaagccagtacctcaccctctgactagtgacttacatggcattgcctcactcaatgctttccccaaaagttttaaaaaccttttgcgatgaaatgaaactaaaacttaaatacacaatcgttatatatagtttatgcaaaggcaaaaataaaataaaataaaaatcaatatcaatggtcactagtgtccacggcctttcctgctcggtccagaggctaaccggaaagccaagctcctcatcaaaagatggtctctcgaaccgttcgccgcccccgagaaaacgccaaaaccaccactctctacggtggcggtcgtttgatcacagccggtcgtttgatcacagccggtcgtttgctctgttcgcaatgctctgcaatcaactcccccaagaattgaaaacacctccaccaagaagatgatgcacaacaagatcataagcttcttctccatcgatccttgacttaacttcggtttattacttctcttattgagttctctctcaaaatgttggctttgtcaaaacgagttgttgagttatgagatggaaaggcttgtgtgtgtatatatagttgtgtgtgggtgcgtgtgtaagcaaaaggcatttattgac

SEQ ID NO: 50713 - DNA, 576 bp, Arabidopsis thaliana columbia
agcttgatcttcagacaaactagaaaatgcataaaccagattaccagaagtaaacactagaaaaagattctgtttttagaagcaaaaaatcacactcacatgaagaaatagctaactaaagaaaccacaaacaaacacaaaaatcctcttatagatcaaataacctatcgaatcatatacagaaggaaagagtattaattcagatggaaacactcccaagccccaactgatattccttgtaaacaaagaaaccatcaaaaaaccctagaccctcttaattaatcattctttcgagagaaaggcttgaagctccttctctatgtgttcttgagcagtttttttggccgcaagaaacggacgatagtgatcagtgagcatccataccatacatttggtcatcatcgcaaagactccaacgttggtagcttcatcagtgcaatcttcccagtcagtaaatggttccttgcaaccacctcctctcatgaacgctgaaaacacctctcctttctcttcttcttcccttacttcatttggggatacggattccctggatctcgcaaacagttgacggaagaa

SEQ ID NO: 50714 - DNA, 539 bp, Arabidopsis thaliana
tacagacaaaatcttttatttctttactaagcaaaacagacactatgatcttttgtcaagttatacaacagagcatgcctgttattcttgagggcaaccaaactggctaccacatcagcagagagagcataaatcgggccataagcatgaagaaagtactcttttcccagcagatgagacaatggttcatacctgcaaaattccatttttgatcccattcccaatagttttcaagcatacattagttctcagttttgtacttgccttcttcatgttaagatctgcgtttcaactttttcatacttaccatttgagcttaggatctgtgaaaaccggaccctttttcaagcatcctaggtacgtctgagagtgactccgctctttcgccaatagcagagagagtcgatctgtggaaaacatgaataaaacaacatagcaccatttaaaggtccagattcttttttccctgaagacagaggataaaactataagagctaatcacctggcctcaagtatatatcacatcagctttgacatag

SEQ ID NO: 50715 - DNA, 737 bp, Arabidopsis thaliana
ccttgtgaagatgaagtcctaatcgaagtatatcactcgtggagagttcaaagacaaataatattaaggggacagaacttgcctgttgttcttgagggcaaccaaactagtgacaacatcagcagaaagagcatatatggggccataagcatgaagaaagtactctttcccgagcagatctgccaaaggttcatacctgcaaaattccaaccaaaccacaagagattttctcaaaaggataagcatgattcgagtgttctgttagttgttcattataagttgtttctatgcttaccatttaagctttggatctgtgaaaaccggaccttttttcatgcatccaaggtatgtctgcgagtgaccccgctctttagccaacagtaaagacaaacgatctgtgaagaaaataacagcctcttaccaaatccagaactttactgagaacacagattgcaaaaaccagagaacagagaaatgcaatcaaattacctggcctcaagtatatatcatcatcagctttgacatagaattctgaatcatatagtgcatatgcagctttgaagaaagccaaactacacaacgaaaacacataaacaaagaccatgaattagagccttccgagttatctatcatatgagatatgaatagagaaagaattagtctctaaactaacgttttgtaggggagcttactgtactcctcctcgatatcgagcagtataaagtcatcgtacattg

SEQ ID NO: 50716 - DNA, 1027 bp, Arabidopsis thaliana
tcccccaacaatcttggggtttttattaacctactttatacagtttgtttctgttagatttgatcattcatgtcaacttcgggctatttagtattctttttatatacatttcttggttagaagtagtttatggggtttaattatctttagtatcactaaaagggcagccataaaagtaagtattaaaatatttgatccaatcacatgtttccacttcgtttttgtctgttacctattttcctaatatatattctataccataaactcaataacctaaatataactaacaaacaaagacatttataaactaaatgtttactcaataatattcaaaagctatatttgtccttgagattaattgcatttaaaaagattacacatctggaccagttcaaacattaaattgtggcccacataatggcccagcccaaagtggcaatatcatttctctctaagcgcgttttccatctgacataaatcatattcaaatcttccacagcggaaatgaagttagagaaccatatgatcatcatcataaattcatcattaattatatacattcaaaatcagtaatggaccctcactttctctaaccaaagaattaaataaataaaacaacaacgaaatgtgcttcttctaataatcgaacaagtcttgttgatttttctttcttcttggggcggatcataatttagaaccgcccgaaaccttcggatcctttcgctctctccaatggctctgatgcgaaccaggagccagttgaacgtatcttcattgactccaccacctcctcctccgtctccgatccctagagccagaggctctcgttgcgctgccagcgagattctcaccgagatcattgagcgatcgattcaggttcctgagctcacgcttccggaatctcattctggaggtgaatcttgcggctcacgtcatctgatcccggcggagattgattttaggttattggcgtcgaggagagaaggttcggtggatcggttggtgcgatcggcgagagagtttgggg

SEQ ID NO: 50717 - DNA, 862 bp, Arabidopsis thaliana columbia
gcaataacaccaaatgagaagagaggctgtctggctgcagaacccatcaacctattgctctgtgaacatcaaaagttatgttagaaaaaactttcacaatgaataacatagtttagcttcacatataaaccctcaggactaaaaagccacgatttttgaaaactggcacatgaacaagtttctgatctcacaaatttgagctgaaccttttattaaacagtagttgaaaaaatcacaaaagaaagggtggaacaatgcaattgcaggtatatttgtaagaatctaatcccattcgtcagaattgttttcttaaatccattgtaatagagaaatcgtagactcaatggtcgatatcggcgtagatcgtgaaaataaaacgaaagtcgtatggaaaatcaacaacattttggtaaaagacagacttacgacagtagagtttcctgcgaggatcagacaaggaatgcgcagaggtgaagcagaatcggacaaggcggaagaagttctgggtaaattccagagaagatagctaaacacggaaactcaagtgaaactggagaattttcttacaaatcgtgtagtttttctttacgctggttaaactacatgctgtttctttccgacgaatgccaagaagagaaaaaaaaaaacgccccgttaatttggtttgggttattgtatcactaattcttatgatgggctcatcaatggaggagtttctttagtttatattttagttttggcctttcatattttctttgcaacttatctcttattataccatttcttcttcaatatataatccaatgtaaatgcgttataaaatccattctcttagcttggtgttatgaaatcattcagtaat

SEQ ID NO: 50718 - DNA, 555 bp, Arabidopsis thaliana columbia
cagatttccatccggggcgcttcaagatcaggtcggggaactctttgtggtgatgttccgaggcgttcttggcgttgcctcgggataatcttttgacgtgatccccgaggtgttttggagcctggctcggggtggttcttcgacaagatcaccgaagcgttaatcatggtcggctcggttttctaggtggaatccgaccccaacagtattgtctaaacactcttaatccctctctaactcttaaatttagtcaaaggctttggattgtgactcattttgaccataagaacactaacaaagctatttactgcttcaagcaattttttgttggttttagcctgttttaagagaaaatgggtatatgtgttgtctaaacactcctaatccatctctaactcttataattagtcaaatgcattggattgtgacacattttgaccataaaaacactaacaaagttgtctactgtttcaaaacaatttttgtttgttttagcctcttttgggagaaaatgggtataactgttgtctaaacactcctaatccatctctaact

SEQ ID NO: 50719 - DNA, 586 bp, Arabidopsis thaliana columbia
gcaaataacagcacgttattacaacaccaagatcaagagcaggcctttctttgtaggagattacgtacttaaacgtgtttttgacaatacaaaggaagaaggagcaggcatgcttgatattaattgggaaggaccttacattattatcgaagtggtccggaatggtgtttataagttaaaaaacttggaagacaggctggtctagcgtcctttgaatgtggtcaatttgaagaagttttatgtttaagtgacacgcatttttattttatgttgtacatgaactacggtgtggcttgatcccgcaatggatacgtaggcagctcggagacaagttaagctactaataaaattttgttttattttgtcattgaaaaaggagttcgactgtgcgaacgaacaaggcaaataaagttcgagtatgcgaacatacaaaacttggaaacaaagaaacatttattcagcaataagcaaataaggcatagttgcgtcacacacacacttcaaatatggaaattcttctcgatgagcagaatacttgaactccttgtccagcgaggtcaagaatcagcaagatacaatttaggat

SEQ ID NO: 50720 - DNA, 987 bp, Arabidopsis thaliana
attttgctcggatttgggactatcgtgcagagatctttagatctaatccggattcaacatttgagattgagacaactcctagtccaacaataggtagcttacagaggttttttcgactctttatttgtttcaaagcacagagagattcttggaagcacacttgtagacttatcataagaaaactcacttgctttttcttgacttcttccactcagccaatttctcaacttgtgttgcgccaactttcgcaaatggataatgataacacggtattttagcccattttagctattattttcttatgttttagagagcatttggtgctatttctgagtcaagaaggagataaacatgtattttgggagccaaaaaggttttaatagttttagagcaaaaaagaccaagagatgaacaattctcgtatttcagaagtttggcactcattgaagatcttcccgtgcatcaaatctacatatctcggagtctatggagagctagaagagtcaagattaacatcaaagtcgaaacaaagcaacccataaagcttttcggaagaaacgacccgaagaatgaagacatgtctcgagaatcagctgcattgcgaacgaccattccgaaaccaagcggttgcggagactcgtacccgggcggtctctcacgtttccctccggtcattaaacccgcgtccaaatcacctcctcttcatcccaccatcataaactttgacgaggagcccctctactggtcccaatcacttatccaaccaacggaattgacgtttccactcctaaacctaattcttgatcccaagtataaaaacattttgtaaaccataaacctaggggtgccatattcttgaattcatcccaagcaaacctagctgccgccgtgagccccaagctgttgtcgacctttgggctttgaagaacacgaatctctccttttcctagtttgtagaagactattaaggtgaagcttacttttgta

SEQ ID NO: 50721 - DNA, 641 bp, Arabidopsis thaliana
gggtaccgagctccgtggtagagaggcgaattggacaaaccgtggtagaggctgaaggtttagacgagctgggcgacgagagaggtggactctgcagtcaatggacgaactgccgctagcgaggaggtagatgagttttgcagtcgagggatgagttgatagctagacgaggagttggacgagctgactagctgacagctaggcgaggagatggtcgttgagtgatggcctgaagagcttgaagacgagttgagaagcttgacgaagaggagcgagctaacgaactttttgagacggacgagctgacgagctttgtgagacggacgagtagacgagctttgtgatacgggcgatctgactagctactctgtctctctgcgtgtcaggcggcattccccccattttgacatgacatgatattccgtatttatagcactacgcgtgtagggcattcatcgagggatttgacgaaactacccttcgccttaatactccttggtttggaacttattttgggcttttgactcgggttgcagttgattttgttaaatctaaacaacgaccttttttgttgcgttcttagtgattaagatatatgttgcggccatgctcgatgacacatggtccgtggtgatgaagtg

SEQ ID NO: 50722 - DNA, 500 bp, Arabidopsis thaliana
tatcatgagcatattcgtttggattctgaattgcttttcctagaagttggcttatctgtttttgagcggaagtagatgcagaatgtccctccaagtaacggactttggtatttagtgattccactttgacatttagatcattctagctacagtccagcttattgtgtaactcagatatcttcttggccatctccatggagccagatggttgtccatgaagcagctgttgtagcatttgtttcatatcagcgtcaggagcagaaggactttggtgttgctgaggtgcaaacccaggtggtggttgctgctggtagttcccttgaaattgctgcttgggaacaaaacattaattgtagtaaacaaaaggtttgttctgaccttgttgttgctgtggtggatacacttggttctgtgggttagacacgttggtgctgcggtaagagaggttggggttgttggtcttgaagttgttatacctttgtcgcaccttgattgttgat

SEQ ID NO: 50723 - DNA, 531 bp, Arabidopsis thaliana
cttgtgtacatctctcgatctttgttatcgttaataaaaagaaccagctccgttcacctcccaaaatctcgtatattattattgtgcatccccagtacaaacaatgtttttcttgcttcttctgcaacacatagtctgctaaaccttggttttttggacacattacccttctctggtcaatcatcactacccacttcaaaaagtttcaatctatcaaattccttgatgcattgcttacattcgttacacaaaaaagcgagaaatttctcgtaaaggtttgatctttagtttgtcggagaagtttgataagtgcttttaggcgttttgttgagaattttcaaaaattggggatttgactaaaatgcgttgagtgacgtcatgacgtgactagtcaagagcctcggtctgaaacagtggcttaatccaattttcaaaattttcgatatgaaaagaatcttggtcttaattacaccgaaccggttttgaaatctcaatccaagttaaaccaaaatgaaatcaaaactggcagca

SEQ ID NO: 50724 - DNA, 696 bp, Arabidopsis thaliana columbia
atttattcttgggactgtaattttgaagacgtcaaatatgtttctctgttaattattaatactcttatttgatatatgtataacttgtgtatacaggatctcaagcagatctggtttgttatattccgtatccatatacaaagaaaccaaagaacatttggctcaatgttttaaaagtcaatccgaggggaaacatttctggagaatatgaaaataatgatccgactcttttgcaaacagaaaatgatgatgttgttttactcactacaattgaagatcttgtactagaaaatccggtggaaggcttaaacccaataatccttgattacaatgttggggatgctgaaccagaagacgaattccgatgtaatttatcgtcctcggacgaagatgaagtagaatatgaagagtaataaatgtgtgaagtatatgtttaattatttgataaaacatttgaatgaattttgttttataatatatcattgaacatttaatttgttcatgaatatttcctatgtaaaattatttctattttaaaagtataaggtgactattatgctactacttggcgactaaattataatttggtgggcttccaaattacgaagtccaaaaccaatagagatgtgacaataatgcgactactcaacgactatcctttgctttgttgggtttctaaatatcgaaacccaaccc

SEQ ID NO: 50725 - DNA, 498 bp, Arabidopsis thaliana
acaaaattcgcccttttggttaactccttaaggccgctgagttcagatgccgcaatcttcgcacctctctgcataaggatgcccactatctcctcagcgcctctggcttgattctcagcatccacctttggcccgacgaggtcctcttgctccttgagataagccttcactctatcaagacgagcttgggctttctttgtagtacgggcgactttagcagctcggtcattccgcaacctgttgcactccctcttcccgtgctcttttacagcaaccaatgcgatctgaagatcgctgatctctttctgaagatcggaaccaatctacaatgccattctgggaagtccttggacgtggaccattgaaagatgagcccgcattctttcgttcttagcttcgaattccccgctgaaccgactgactacgagttgagagtcactgaaagctttgatctgtttggctccgagccccttagcgagtcgaagtcctgcgagaagt

SEQ ID NO: 50726 - DNA, 668 bp, Arabidopsis thaliana columbia
tacgtgtatacccgtgttacgcgtatgatcttgattttaattttttattaataatatatttgaatttatcaaaaatttatatttattttaccaaattgtgaatgcttttttattataagtaagatttttgtcttattgttttttaattatatatgatttcttgcagtagattgtttacagtttgagtataatcgcttttattgttttaaatatttatcattgatgcatttttctaatgttaaaataattttttattatgtaataaaagaactatataatttgtaatattttgtattattatttaaagattaactccccttctcgttaaagacattagtttttgtaacaacatttattattagttctaactgtttaatctaagtattatgtgtatcaaattgctcaaacaaaaaaaattgcaaatttatttgcttaccaaacaattccctctaaatttggcaaaccacatttattgcatcgtagaagtattttttttctttctaaattacgctcataacctttctaagataagtatgtccaaccgtttctttctaggatgccaacaatatatgcgtggcagagaaatttatcatcattagactttttaaagtgttgtaaattgttgaacgaaggattcacacaatagattagtttagagagggaaacaa

SEQ ID NO: 50727 - DNA, 805 bp, Arabidopsis thaliana
cgccacgtcaaaggaggaactgccagattcctaggtgaagaacatgcgcgaggcggcggcctatgatgacatgatggcgaaggagggccaagtaattatcgataactttctccttctaatttatatctttttgcttagttgtgactttctgttttgcttttggtaggcgatagctgccacaaacaagctggttgctctctatgagcagcgtctaagccaggtcccctaggcgaatgagcttgaagaaggaaaggccctcatccgggagctgacgtcaagtgtgaaggctggtcaggatctcgaagtcttgttccaggtacacctcggttttgacttgtttataaatagttcgtcgatgatttgatgattctgacctgattgttatttcaggcggagatcgagaggcgcggtgcaagtcgaaggaggtatcagactttactctaagcaagttggatctcccgcaggttttagagatttcggtggtacgtccaatagacgtcgacgagcaaggaacgccaattggcttggatgagttcaggagcaataaagatgcgtttacgggaggtctcgcggagggttctggtactgtctttgctacgccagccgaagaatcgagggagtgatcactttcgctccttgtttgttttaggatttcgtgttttgtttcagacttaatgcctgtgaaggcttttatcctttcgtttattgacttttgaacttggtgcctggaaaggcttttatcctttgttcggttaagtactcgaatgcttgggaaggcttttatcgttttaacaagtatttttta

SEQ ID NO: 50728 - DNA, 996 bp, Arabidopsis thaliana
ttgcgcatgagttccaccaacactttgactatccgttggttgattttccacattttttggccttcttcatcatctttggcgatccaaggctgcaactccctttcagcctgtaaataacacaagaccatttcagacaatagagcattagagtaaatccttcaacatatgagcttgaaacaagccattattttacacagattttttcttccttatttcctatccttggcatattaaaacaagtgttgcatataaattccaagcttaatttttataaattcatgagagatcaaatgagtgaaccaagcattataaaacattaacacaggccataggttttccgcagtttaatctttacacaggtgttgcattcctgacaaatgagataaaaagtcaaagagtaatttggacctgaaggacaactgctgctgctgctttcgctggcgttgcagatacgacattgcatagcgcatcaacaacctgatatataaaaaatatgatcagtgtatgaagtcgagcgacttaattggattagtaaagaactaccaaggaaactgtaagcgagctgggaaatagaagtgctgaggtttacctgtctccatccttgttgcgcagaggtgctttctgcggtgggctggatttcaggagcagcaatcagtttgtgccataacagtgaaacaacggagaaagacagctccggtttctctgcaagcactgacctcaaaagcttttgtgtaccacaatagaaccctgcgagtctatcagctgtgaggaaattcgcaagatcagaagcatccaagaggaaatctttgatacccttctctgagggtctccctgagccttcatctgaatgtctagcatacttatggtttcctcttggattcatttcagtccttgaggcggatgtcacgctgtatcaaagcatgtggtgcttgacatgtgttctcttgtttccagtttaacaggcacagaaccttctgaacggtgtatcttaaggta

SEQ ID NO: 50729 - DNA, 568 bp, Arabidopsis thaliana
gagaaggcttaacggtgttgacgagagcaagaggtggagataggtcgttgaggatggggttacaagaagtgaaagcttgtagagatctcgggttcgaattagaggttccggttccgggtcggatatctgtgtcaacaaccgggtcgaatttcgatactcagactagtagcggcggcgactcacccatcgccacctggcgtatctccagtcctggtaagtaaagtaatagtcaaatatgtttacttatgttttatttatgtttgaatttgtctctgaataaatttatgttattaaattaggtgatgatccaaaggaggtcaaggcgaggttgaaagtgtgggcacaagcggtagctttagcttctgcgacacgtcaagcttcttagtcatatatctacttctctgttttagttttttccttcttctttttgttgaagttatagacttagcgtttttgatgttttttttaagttatgctttatggggacgagtttttagagttggatttagttccttttcttgcgtttgtaaatacgataaacagtagttgtttcatggatgatgagatt

SEQ ID NO: 50730 - DNA, 676 bp, Arabidopsis thaliana columbia
atccctcctagtggagtaggtggagttaagattcagggttaaacaaacaaggtaatattgtcttagaataaagttcgttgtgacaagatgcagaacattgagagttttgattcccaataagaaaagtaaattgagtgggtagttttgagttgaattcatgtttttcattttggtctgtcagaaaaaggataagatttaggttagcgggataaaatcttttagtagaagaatgtaatgagggaatttttctttgttgtttttgcctgaaaaggtgaaaagaatacaaaaaccatcctgtaaagtttgttgaaggacaagttcaggataagattttgatttggagattcactttgggtttggatttaatgaaaattagaagtttaaagtaagttttatagaccaagttgttggacaagcaatcgaattgggagctatgttatgtcttgattatgcttacgagttcttttatgttacctatattttcactatgtgaatacggccgttgtgttgactcatcatcctcaacatgaatgtggaaaaaattaaggaaaattagaaaatgaaaactgcttgaggctgaaaataaggcaatgtgaaaaacactgtacaagatatgactcaacacagtgagcttacgcctatatatagaggaccaagtgttcttcttctctaacac

SEQ ID NO: 50731 - DNA, 510 bp, Arabidopsis thaliana columbia
atccccagggttacctgcaccaaacgccgtaaaggtctctatagcaaagcctctcagctttgtcttctctccgacgcacaaatcgctatcttagcgactcctccttcttctgaatccgacgtctctttctactctttcggtcactcctctgttgatgccgttgtctctgcttttctctccggaaaacgtcctgtttcggctccgaaggataacaaagagacgagggaggacgttggtatctgtttgactcgcaagaatctagggttagggttttggtggaatgacgagagccttgtgagatcggagaatcctcaagagattagtgaagcgatcggttccatgtggactctgttgagtaatctcaaggagttgcgtgcggatgaagcttgcgttaacgatcacaaggacttgaagaagaatgagaagagcgatgttcacggaactcaagatcaaaccctaatttttcagtccgcttctgcagtttgttgcatccctgaaaatctaacgata

SEQ ID NO: 50732 - DNA, 705 bp, Arabidopsis thaliana
ggtggatgatattgatatggggtttcgatatttcccttatatatatgagactgagagatagaagaagccttcacttttcaattatctttctccacactcaacaaaattgagaaaaatcaatcagaatggtgaaaaaaggtggcacgaagaggaagattgcgattgagacgatacagaagagagattcccttagggttacctgcaccaaacgccgtgaaggtctctatagcaaagcctctcagctttgtcttctctcagacgcacagatcgctatcttagcgactcctccttcttctgaatccaacgtatccttctactctttcggtcactcctctgttgatgccgttgtctctgcttttctctccggacaacgtcctgttccgaagataacaaagagacgagggaggacgttggtatctgtttgactcgcaataatctagggttaggtttttggtggaacgacgagagccttgccagatcggagaatcctcaagagattagtgaagcgatcgactctatgcggacgctgttgaggaatctcagggaatggcgtgcggatgaagctttagcctgtaatcaagctttcgttaatgatcgcgaggacctgaagaacaacgacaagtgcgattttgtttcagaccacgaaactcatgatcaaaccctaattcttcagtccgcttctccaatttgttgcatcccagaaaa

SEQ ID NO: 50733 - DNA, 801 bp, Arabidopsis thaliana columbia
agattgtactctaaggggttggtgagtacggataatgtggcggctggatttggggttgcatttgtgatcagatggatgagttgttgtttgagatgaaggaatcagtgagtgacgttgaaggagttaaggttagggctttgattcgtgggttaagtgaatcactcgacttagggatcagaaagatcgtgatctattgtgatgacaatgagctttaccaaaacgtaagtgtttactttactttggtataacttttttcgtgaatattttggcacttttatctatatcatatcttgttttgtgacgacggtttcattgtgatgttttggttaaacaaaactgaatctgatttgcaatgcagataacaagtggtaaatgtaaacctaagcagataaaagttgtcaaacaacttataaaagaagttcaacgccttagggagaaatttgcttctagcgaagcaattctggtagccgaaaacgacattaagtttgcctttgaacttgcaagagaagcaattgtttctcaaacaaccagtgccgatgatgatggacatgatggtgacaataatgacgatgaagatgataatccttgggcttacggttgtggttgtgattggtgtttacctgatcctcccactaagcccaattacgatgccgattacattgaattttatagtctttagtctctgtgtttggattaatacatagatttcaaagttgttttgaattttctttctttggattttctatattgttattcgattaatttaagtttcattttgcacattttacaaaaatgtcaacc

SEQ ID NO: 50734 - DNA, 488 bp, Arabidopsis thaliana
cagagcaattcgatggctttcatttgcttatgattaggtgattactatataataaaaaaccgatgaatacattatgttgcagaaccgattctcacgattggaaccacagaatgtgtaacatggccagacaactggactactctgacagcagatggtggcgtcgctgctcagtttgagcataccattctgattactagaactggttcagagattcttaccaaatgctaaaactattcacattgatcatttccatttcaccttttatttgctgatcatttaaggtccatagtataaattcattatctttgagaccatagtctaacaatttgtgttagtgccatcttttaagatctcaagattagtttgctattagaaatttcccacatgttcctcaagtctttctttattcccaaatcccatttacaacaattatttgcgactttttttgttccctgtctttttgtgttaattcttagttatttagatga

SEQ ID NO: 50735 - DNA, 494 bp, Arabidopsis thaliana columbia
tggatcgatgtgaaaacaaaagaagaaaaagcgaaacccactaagccattacatgatatcgaccttcttatctttttcctctttattttatttttctcaggacttttttctacttaatgaaacctccaaactatctaactaatacactcccatgtagaataaagaaaattatataagatattgttgatattttgtaactagaaaatatatttgctctgtaatttttcgtaagttaaatcaacatttttcagtagaaacaaatattactgcaaaaagtaggatcattatttttgtccaaaatctcagttagctatagggttgtagtaaaaacaaaacacattcttgatttgcccaaaaaataaagagagagaagaatattgttcaaaagtggtctcttctctctctaattatgttttcactaaacccaattagattcaaacagtctacaaagtccaaaagataaacatgggacaacaattcgatgcaaaaaatcc

SEQ ID NO: 50736 - DNA, 659 bp, Arabidopsis thaliana
ggaaagagacggcgagattagcggaggacaacgagagattacggcgagaatttgaccggagcgaggaaatgaggagagagtgtgagacgagggagaaggaaatggaggcggagattgttgagcttcggaaacttgtttcgtcggagagtgacgaccacgcgctctctgtttctcagaggtttcagggtttaatggatgtgtcggcgaaatctaacctaatcagaagtttaaaacgggtcgggtcgttgaggaatttacccgaaccgattacgaatcaagagaataccaacaagagcatttcatcatccggagacgccgacgggcacatttatcggaaagacgagatcgagagttattcacggagtagtaactcggaggaactcactgagtcatcgtctctctcaaccgtcagatctagagttccgagagtccctaaaccaccgccgaaacggtctatttcgttaggtgattccacggagaacagagcagacccgccaccgcagaaatcgattccgcctcctcctcctccacctccgccaccgcttcttcaacaaccaccaccacctccgtctgtttccaaagctcctcctccgcctcctccaccaccgccgccgaagagtttaagcattgcgtcggcgaaagtgagaagagtaccggaa

SEQ ID NO: 50737 - DNA, 620 bp, Arabidopsis thaliana columbia
catgatctataatcacatgaagagattaaaatgaaagaaaaacataccatccttcggggttgacgcccttggagtttgtctccactgctgctgccggaggatcacccaccaccgcatctctagtcggataaccaattggtggcggacttgtgtacggccctgatgaagtctctgaaggtttttgcactgtgccaaaaaaaaaaaaaattatctagttggtgagtaaagaattattgttcatcatgattatacgttagacattgatcatgattttagaaaacaattgaagataattaccggaaaagtaattttgcgcggattgattcattctgatttgaggagctgaggagtgaggatgtgagatttgtgaagaggagagagtgttgtgcttctaatttataaggtagacaaatattaggaaattttttacattattcattatataaaagaaagaagagtcaatattgaacaataaaaacatctaatcacagacaactcacggacagacctaccttagcgaagtggtaggtctaggttttttggttatatccaacacatatataattgcagagataaagcaaatgatattgtttgaaatgcacaagggcagaggaaagcgg

SEQ ID NO: 50738 - DNA, 801 bp, Arabidopsis thaliana
tacttatctcggcctatacatttccatctatcttcctcaaaattgtaaaccacaaactcacttccaaacatgtatatttttccatcaagacctaagcttttgacttcacatctatatccaatatcatgttgatactcaatgcatgggttcttcagagtgccccaagtttgagtttttggatcaaacacttcaatccagtacaaggaaccgatgtcttctttacagcctcctgctatatatatcttcccatcaacttcacatactgtggaggaacagccccgggccactcgcattcctggagcctgacgccacctgtgactccgacaatccaggacagagacagaagaagaatagcgcgtccttttccagagtttgtgtctataagacttagtgccgccgattttgtagatattagaaccaacggctatgacactcgacgaatgcacaggaagtaaaccattgggagatggaacttggaccagaagatagccacttgaattctcggcaacgtttcgattaggttcccggcagagagtgaaccaatgcgtgttcatgtcgtaagggaagcaaagatagagacacttatccgtacggtttaagcgtgatcggatctcgtaaagttcgcgtgaagtaatgatagatcgaaaagttttggaaacgagggagagagttggataatacaaccttgagacgagtgagaagcagttcaataacaagtcataaggaagtgacatgatagagattggttcttctgtcaccggagaaggatacggcatcttcttcttcctctcacggagtggt

SEQ ID NO: 50739 - DNA, 496 bp, Arabidopsis thaliana columbia
gttttaataatgtgaaggcaaagaatgttccagaggacaaggaagcagtaaattacctttaagtcatgctcctgatgtagctcagctaatacattcataattgccattgtccaagggtttggtggcctaaaaacctaaagaaaagctattatgttaagctggcccaaaatgtgccctttaatttggattatttaaaacaattcaatacaacataagggggtaggggggagtcaaacaaataaaaaacaaaaaacaaggattaaaaaataaccaaaaacagttaaacatagttaaacacttatacctctgtagccataacaaaacccctagccttctcacctatatcacatttcaaaaacaaaacaaaacaaaaaaccaaaaaccaaagccaaccattataatctttcttatttcacccagcctctcaaattggaaatccaagtgccatagaggaaaacagacttaactagctttacctcacaagaactaagaatat

SEQ ID NO: 50740 - DNA, 773 bp, Arabidopsis thaliana
taatcaaagcaatacttgaaagtgatgtcagacttctgcctcaataattcaaaggataaaacttagccaacctaaaaactatgaacgttgcaaattcattcgatattctatatgcaaatcatgtcaaaaggcttaatcaggttgaaaatccagttaaacgctgcagtaaactattcatcctgcactaaaacccctaacattctgatatgcatctaactggatatgtagaaccattgcacaactaacagaaactggcaacacacttaaagttaagttgaaagtgtcagaatcttgtaccttgcttgctttactcatgaagttcgagagaaccagaatctcaccaaatgaaatggctttatcaatcttcccaccaaaaatgcccccaaacctctgcaaatccattaaaattattatataactaaaataattgccaccttttgtaaacagaacatgatacacttactttcaattggataacaaggatattaggcgcttgcagtatagacatctgcttcctcgccgtcaccagtttttcacagctaaatcaaattgaaaatttcagttaaaaacagaaccacaaaaactgaaagaaagacaaactagaagagaaatcacttacgactcgcatctatacttattgttgccatctaaaatctctgattgaaagaacttttgcaatgactccttcacagagctactctgcaaaatctcaagactgatatccataatctcatcggctttattagactccgaccacaagacaaacacttgac

SEQ ID NO: 50741 - DNA, 487 bp, Arabidopsis thaliana columbia
tgatgcaatttttggtgatgtaccaactgcataaagtattaagttttttcttacaaaatttatttatttttgaatttaatgttttatttctggttttaattattaattatgtttaatttttctaatattatcaatttctcataataatttattgtatttttctttcttttaatagtaatatattatatttattttggtttatttttatttaattactatcgcacccgctggtttaccattcataaaactcccgcaaacgcacccattatcaaacgcttaaccaatcgttcataattcttgataacgcttgaaaccgcaaccgcccgtttccgcaaactcccgcaaccgtaaccgcactcgctgtgtttaaaccagtcaggttaatcgataaattttggagtaagcatataaattagaagtaggtgaggaagatatgttgatagatattatctatattctcatcattgttgatagatattatctatca

SEQ ID NO: 50742 - DNA, 546 bp, Arabidopsis thaliana
ggtcttgaagtaccttgcgtttgaagataagtatttgcttggaaacaggggtcccttgagtcatctcgatcttccgtttaatcattaacactgtgtcccagaaagaaacatcaatggtgaacgatgagccactctgattctcatgatcacacttatcattgtatcaatggagactgatgaagagtgaatagagaaagagagagtctgaatagagaaggtgatgtcaacttgggactttttttgtaacgaaagtttcctcataatgtgttaactaatgacctattattttgcttatctttctctcaattttgctatttttgaaagagattttatctattgttctttgtcaacaaacgtgaaagataaaaaaattcaacaatcttgaaaaaaagtaaccaaaaatacaaaattttttttgtttttttttggtaaaaggtgaaggaatacaacgacatggaaatcactaaaagcttaatgtggctttgaagagatgatgttgtgctataatctgattttgtttgaaactagcaatgaaaggtacatttt

SEQ ID NO: 50743 - DNA, 584 bp, Arabidopsis thaliana
aaaataaaagttggtcagataagaacagaaatcaaatgaagttcatatgcatgacctaacaactaccaggcttagtagtccacttcgaggggagcaagtccggaaggtttccgatcgaggcagacctctttttaactaagaaccacgggtgatgccaattctcatccttgttcgggagatgcgagatgagatttctgttggcattcggataagccgagaagtatccgactttcttcaaagaactcctcacgctgagaagttcattcaattcggggaccccgatgacgtatccggcttcagccgcgatggtaataattcccagaatagtccggaggagattgggagtcagctggggtaaggcgatttcaagggccgacaaataacgaacgagggctttggggagaggaaaaatcaagccacaccctttgaagtaaatctcgtacacgtagaagaacgcgggtcggtggtcctcggcgattcggtaggctccggcatctgtaaatcctcattacttcggccgaaatccgacagagctctcccaatcgattaagagattggagagtgcatgtggattgatagtgggg

SEQ ID NO: 50744 - DNA, 1032 bp, Arabidopsis thaliana
aatgggcttactattgaattgcatgagtcacaaaagtttacacaagcccattattaggcccaataataacaagttcataattagataatgggctagataatttctaaggtcttttttaggaattgcaaggtttcaatatcaattagaggttttagaagaagagagtataattgtggaaaaaaaaaaagaagaagagagtataaatcttgatcgaccataataagaagtttgtaatgtacaaatttatacgacctcatgtaacaattcattacccttcaaattttcttcttctttgttttttggatatagcaaatttgttcttttctcatcttcttcctggaattttgttctttttcatagttttactacaattagtccaagacgatgcagttgctactcatatatagaattcttctctcttcgattgagatcattagtagcctgcgaacattggcggtggtggtgatgcgtattggtggccgatgaacggtggtatgatgaattcatcgtcacttggagctggtgcatgagccggaggggtctctttcttttccaccggtgctggcggtggtgattggactggtggggagttgatcttgggcggtcttggcggaggagagtagactactggtggagattgcgacggcggtggagaaaagaccggtggtggcggtgaataaacaggtggtggtggcggtggggaatgaaccggtggaggcggtgagtgaacaggtgctggcggcggcggcgaatggactgggggaggcggtgagtggactgggggaggcggggaatagactggaggtggtggtgaaaagacaggcggtggaggagagtggacaggtgggggtgggggcggaggcgaatacaccggtggtggtggaggagagtggactggcggcggggaagagtgaacgggtggaggaggaggtggtggggagtaaactggtggtggtggagagttgaccggtgctgtcttcttgatcacttaaacacttccgtaattgtgacacatggaagacgttgtaaaac

SEQ ID NO: 50745 - DNA, 467 bp, Arabidopsis thaliana
gatttatttagcagagtgaatcatgggaaggtagctcgcatcataccaaaagatcaaaatcacaacacatgcaaagtaactgtaaccaaaatcaataccttgggggtctcttgtcgagatattcctctacttttgaaagagaaggcttgaataaagaaagtcttgcggctagagcttcttcaaatggaacagatccacccatagctctaagaacagcaatactcgataagttaacataaaaaggcagtaaaaatcatcagagctttagcatatatatgcgttgagatggaccaaaaacctggcaggtccattcagcaacagcctttccagctccacaaaactcagcaagttcatcaataccttcatccacacaaaccgtgctgtccacatcgaaacataccgcttcaacacttctccaaagatcaagaatttctagcaattcagaaaaccaacaaccataagtagag

SEQ ID NO: 50746 - DNA, 861 bp, Arabidopsis thaliana columbia
tataattacagtgaagatgagttcctgaaagttgaggagagtgacgaatttgacgttgtagaggtagtgtcgacccacactaacccatggtgtcgattgacaccatcacatatatatgagacatcaagctgtgacgaagcaaaatcgatcaagctcgacattgaactttagaatcactcgacacccatctatagtgtcgacagataccacttgggtgtcgattgacaccagtaccaaatagagccaatgtcgacgtctcgacggagaagaatcaaatgagattgacagagacggatcgataccagatagtagtgtcgaccgacactcacctaatgccgattgacatggatgctgattgcaccaatcatccttgactttccacctgttgttgaactagtctacacacctgaaatttcttgtcctatgcctcaacagtatacgcaacatattcaggaggagcactgcaaggctccatagaatcaaggagacataaggaagataattgtcgtctcagaacagatttcagagctaaattatcgacatgttaagggaagacaagttgtagcacgagtgtcgaccaacacaccacgagtgtcgatcgacacccatcactggttgagagagaatcatttaatataggtacttttcaaggtcgaatcacttctataagtctaggaactactgtcatgtcacccactactgtcatgtcacccactatacctctactccttcatccacctcctaaacgaccaaggtactcatctcctcctctttaacctccatatgtcatcaataagagtttaaaattttcaaaaactgttttacagttatgcaagctacgagtttttcgtcgagtgcttg

SEQ ID NO: 50747 - DNA, 679 bp, Arabidopsis thaliana columbia
ttttgtcatgtacgtgaactacgtgtggcttgatcccggaatgctacttaggcagctcggaaacgagttcagctattaattaaaaaaaattattcattgaaaaggaaaggagttcggttgtgcgaacaaacaaagcaaagtaaagttcgactgtgcgaacatgcaaagacagaaaaagataaatttgtttaaagcagtaagcgaagaagacgaagtctcaacacgtgcgcacttcgaactaagaaactcttctcgttttgcaaaacagttagactccttggctagcgaggtcaaggatggtgttaagggtgtgaagctcccttgatatcgcggtgacccttcgtagcatctgattgatcttcttttgcagtttcttcttttctaatgaacgcttctgatgctgaactgcaagatctttgatgaatgccatcgcgatttcttggtctctgtctgaaagttccttgatcagtgcacatggagctcggatttgggacctaaagaagtcgcgaggtggagaaggctttctgtccggcacgtttgggatgtcctcatccatcattccgacccttgagaagtctggcatggactccaaacatcaaaggttgaactccataactgcaaaaaggaaagaagggttagatgaaaaataaggacaacttagaatggctatttatagggg

SEQ ID NO: 50748 - DNA, 757 bp, Arabidopsis thaliana
ttctccaggtcttagagactcctcagcctttatcatgtaatcaggacaagaattctcctggttccaccttgaggcgttgcgagagtagtaagatgcagaatcttcaagcaagaagctttcaaaatcctcttcgtatttaaccagctctcccatcccattcccacaatagacatctattacgtttttcaatagtgctctatcaatctgttcgccctcgcgttctttatgaatctggcaatacaaattgcgttagataaaccagaataagtaaaccagagctactcagttagagatacttacaagtgctagtacagcgtctttggccttggactgtaactcttgataaaccaggtcgcggaaggatatgaagccaacagcactcagtgttggatgagacccccgacgagtataaaaacggtcaagatattcgaagaagtgggataaccatctaacaagaattttctggttggcccatctcttaacaagctctctcaacatatattcaccatgcttctcacgtatagccggcaacacctaatcacatataaaaacattagaccgtttgctcaagttgtacagaacagcgttacagaatcaaagcccaaacgcaaacatggtatattactcacagtttgtttattgtaatcaacatatactccaccataccgatcatagatctgctgtgagtaatcattaggaggtttctgggtacacagattgtggacagtcctgtgaattcacatcgctgtgtgttagt

SEQ ID NO: 50749 - DNA, 1052 bp, Arabidopsis thaliana columbia
tccaaaccaaaatgaagaaatgtgcagaccctaaacaaaacgcaatgggcaccaacagaagatgtggtcctcattagtgcttggtcaacacctccaaagatcttgttgtatccaatgaggaaaaaacaacaacatcctagcaccacatagcaacctactttttcgcaagtcccaagctaacagagatggaaaagagagacctttaatgctgtaaaaagagatgggaaaagatcaatgagggttgttgcaagtttgtaggaagctatgtggctgtaaccaaagagaaaaccagtgggcagaacgataatgatgtggtgaacttggctcactagatcttctacaatgattacaatacaaagttcacccttgagcacaattggagagaggttaggtttgatcagaagtggtgcgtccaatatgctacatacggtaaagagaagcgacaaaaatgtgatgaacactcttccccatcctatgtgcaacttggccttgaagaggatcaacctcgccccttggggtaaaggcagccaaagcagaagtgaaacccaaagccaaaactaatttggaaggtgatgaaaacaagactatgacagagatgcaaaatatttggtctaattaaggagaaagatttagctttcaaagagaagccaccttaatggtaacaagaagctactcatgttaaagaagaacctaagtgcagagaggttactagataggctacagaccaaaactgagcttctatctgacatcgagttggctcttaagcacaagttaataactgatatgttgtcctaagtttaagtttctaattgaagttgtatatttgagtttatgttctttttttagtgtatgtttaatgcttttgtttcagttgtcttctatgcttttgtttcagttgtgttatatgtttaaatttcagttgtattatatgctttaattgcagttgtgtttgatgcttttgtaccaatgtcacatgaatgaaatgagtttattaattgtgtcctaagtttaagtttaagttgtgttctaagtttcagtttcggttatgtttg

SEQ ID NO: 50750 - DNA, 290 bp, Arabidopsis thaliana
ggtatgtaatgtaactactgacgagtttggcggtagaggatgtgacagggatcacacgtaagaacgggcaacgctacgcctagaggatcagcagtacccaccaagaagagatgcaacggaccaaggcacaccgcatcgaatgccggtttactcggcatgagagtaccagaaggagcgacccgaattgagaagatgaagtgaatctaaactcagcttacacgcgaaaagataccgaacagcggaatatgaaagcctagatagtggccttgatctgaccaaacatgatgaga

SEQ ID NO: 50751 - DNA, 798 bp, Arabidopsis thaliana columbia
tgtcgactctagactaagcaaagagacttcgtacttcatataaacttagaaagacggtaatagtaaactagttcagtgagacatgtagtctctaacaccttagtcaacagagacgcggagataaacaaacaccataaaaaagaagaaaaactcacaaagcaacttgataattttcaatactctacagtgacttcaatttcaagccaaacaaattacaagaaaacataaaaaacaatttcataaatgcaaccacacgcacacatctacagcttcccccaatatattaggaaaccaaaaatatcaaccaggagacaaggaatggagcgaaccacttgtttatgcgtatatgaatgaagaaagaagaagcaaaaaaaaaaagacctgaatgtaagagcaagcaagttcaatcgcgcgcatggtagattggagttgagctaaatcctcagctccaactccaccgccaccgcttccatttgaaaaccctaacatcttctcctcgaagcgctgattccggcagccggaaaaatcaacagtctcgtcgctttccaagtagaaaaaatctgatcgagttgattggaaagtgtaaagaagaagaaggagaaggagatgaagagtcgatcgaagaaggaaagtggcggcgttgagcagtgtgaaatggcggagaaagggatccgatggcgagagagccggagagatggaaacggtgtttttagctgagaggcctatttggagtttttttaactggacatcaaattccatattatttacgggaatacccttccttcttcttataaatga

SEQ ID NO: 50752 - DNA, 664 bp, Arabidopsis thaliana
actgatgcctctatcaaccaatactcaatcacctagcatactgagaattctacactactctaacccatcctcagaaacctattcactactcagacatcataatagaaagcagaaacgttgaacaggttgaagacatgacaacaacagtgtaacagtaggatgataacagaatgaacaacagtaaacgaaatcaagaacaaaagctgaatactgaacactgaatagataaagagaaatccggattacaaaaagtctagaacacaaggtctgcagaataaaactagataaaaacttcttgtctgcgaaaatgtgaagtacatgctacttatagccaaatattccgaaaccctaatactcaaaacgacaaagtattgggacggattaagaactgtactcgacccatgtggtcgagtgggaggtcgagtgaatagctggagtcttcttttctttcttgtgctcgagtgtctggttgagtgcggaatgaagaaggctctgaagcttgtcatcgagtatgcaatcgagtggtgtgatggtgatactcgacttccatgtagagtgatgaggtcgagtagaggtctagcaatgggatgaagtcactacatctgggggtcgagtgatgtgatcgagtggtggtcaagagatggagatgaagacactcgacggg

SEQ ID NO: 50753 - DNA, 677 bp, Arabidopsis thaliana columbia
taaatggttttttttacgttgataggacgttacttaataataattgtaaactataaaataaaaatattttatagttagatacaatttgtaaacttttatatatactaacattaaaaaataaattgtttccgcggtgtaccggggttaaaatctagtatatatgtataaatgtaacgaataaaatgagtatataattttatatgattagtgttgaatgttttgacttaacataaagttgcatcaaaatgtataactaatgctatatacttctctttttgaaaaaaaaaattgagtcttggtatattaaccggagacgagataatgtaattatatattaagattttttttcactggcatcaaatctaccagaacagtcaaagaggtaattaagagtaactgcaagagctgaaatcttcttacaaacaaaaacataacatagacccataacacagagacagagattaccactaaactagaccaaaatgtcctcgaaacgataactaagtgcacccacagaaccagagaccattaacatccttagagcatcaggaaagagcagaatccactcgaagcgatcaagagaaggcagatgaacaatttgcttgagttcttgagagcaaacacgctgctgtctgtcgtgtaatcagggttaaccctgtcccagtggtgcctcctgt

SEQ ID NO: 50754 - DNA, 798 bp, Arabidopsis thaliana
gggctccaaattgagtggtaagtgtgtattttgcatgttttgagcatccatctctcatcactttagcatcatatcatcactgttttataccatttcacatcatttgtcatcactttgcatgtttaggatagttttgcatgcatgttgcatatttgtgttgtttttaggtgatttggagctgttgacgagctaactggaagaagcggacctgatcatgataaaccactcgacccagaggtcgagtaggagcttcaagatctcaagagaccactcgacccccaggtcgagtagaagacatcaccacttcacctcaccactcgaccaccaggtcgagtgtcttcatctccatctcctgaccaccactcgatcacatcactcgaccccgaggtcgagtgtcttcatcccattgtcagaccactactcgacctcatcactctacctggaagtcgagtatcaccatcaccaccactcgagtgcatactcgatgacaagcttcagagccttcttcattccgcactcaactagacactcgagcacaaggaagaaaagaagactccagctattcactcgacatcccactcgaccccatgggtcgagtacagttcttaatccgtcccaatacttcatcgttttgagtattagggtttcggaatatttggctataagtagcatgtactccatattttcgcaaacaagttttttatctagttttattccgcagactttgtgttctagaccttttgtaatccgaatttgtctttatctattcagtattcaatattcagcttttgttcttga

SEQ ID NO: 50755 - DNA, 1518 bp, Arabidopsis thaliana
gtccaaagagaggtttgatatgatggagattgatgaagaagaagagaagaaagagtccactagtccacagacaggtaaaacatcgagcagtcgagttttatcgccatccgaatcattctccgatagcaaatcatcctttggtagcagaaactcgttttgcgggtcaccgaccacgccaagatcagttctaccagaatcgatgatgggttcaccgggaagagttggagactttgcaaactctgcatctcatcttttatggaatatgagagttcaagcacttgaaaagcttagtcctatcgatgttaaacgactcgctatccacatcttgtcacagaaagaagctcaggaaccaaacgaaagcaatgatgaagatgtgattagtgttgttgaagagatcaagcagaagaaggatgaaatagagagcattgatgtgaaaatggagacagaagaatctgttaatcttgatgaagaatccgttgttcttaatggcgaacaagacactatcatgaagatctcttcattggagtcaacatctgaatcaaactcaatcattcagaaaaatatgaaaattcatcacaacttttcccgccaccgccgcctcctcctcctcctcctccactatcctttataaaaactgcttctttacctcttccatcaccacctcctactccgccaattgctgacatcgcaatatcaatgccacctcctccgccaccaccaccgcctcctccagcagttatgcctttgaaacactttgctccaccaccaccaccaccgcttccaccagcagttatgcctttgaaacactttgctccaccaccaccgactccaccagcatttaagcctttaaaaggctctgctccaccaccaccgccacctcctccacttccaacaactatagcggctccacctccaccgcctccacctccaagagctgcagtggccccaccaccacctcctccacctccaggaactgcagcggcaccaccaccgcctcctccacctccaggaactcaagcggcaccaccaccgcctcctcctccacctatgcaaaacagagcaccatctccacctccaatgcctatgggaaatagtggaagtggtggaccaccccctccaccacctcctatgcctctagctaatggagcaacaccgccaccgccgccacctcctatggctatggcaaacggagcagcaggaccgcctccgccaccacctcgaatgggtatggcgaatggagcagctggtccaccaccgccaccaggagctgcaagaagcttgcgtcccaagaaagctgccacaaagctgaaaaggtcaacacaactaggaaacctttatagaatccttaaagggaaagtagaagggcgtgatcctaacgcaaaaaccggcagcggaagcggaagaaaagctggagccggaagcgctccagctggtggaaagcaaggaatggctgatgctcttgctgagatcacaaagaaatctgcatattttttgcaaatacaagccgatattgcaaag

SEQ ID NO: 50756 - DNA, 565 bp, Arabidopsis thaliana columbia
tgttgatctctctgtcagacaagcagtttcagagttagacagttggattgcaagagcagatcctcagctcgttgaagacttggagaagcatctttatgtaaatgccgctttagagcgtttggagcagagaaaattgtactggaatgagcataagctctctatttacagcaaagtgtgcacaacggctagaaatcagactcaatcattgtcacctcctgatgtttctcgagttggttatcaagcacccatggggggccatggagcgccagatagcggctccaatgatcaagataaatcaactgaagattcttcagcggataagtcagatggagaatctcaatcaagtttggaaaagggttgtgataatgatcttggtcatcctctagaagatcaagacgcaccgtcatcttcctcatgcaatggaagtaaaggtttcctgtctcaccaaattgacaccaaagacctgaaggacaacgacgcgtacaacttttatcaggtaatcagtttctgatgcatactgttgtgttttcataaagtactaatgagctgcatgatgattgtttta

SEQ ID NO: 50757 - DNA, 624 bp, Arabidopsis thaliana columbia
cctttttttcttcaccacagcactcagattaatgagattaccagggacatttttttcacttggaacttcaagatgtgctggtcgaagccactgtggccactctcctaccgtcgagagagtggatggaatactacaatctgttccaaaccagcctttatcacactgaaaaggcggtaaaacacacacaaagttaggaaaatttagattatgaatatgcaacctctcggtaccaaaatgtcaagcgtggtgactgtggatacacaattttacctggcagaaacctcctctgcatttgccatgtccagagcactgattaacgcaggtgcattgtactggaatttcgcagaaccgtccccaaagacaatcatatttacagtcacattcctctttgattttcaccttcatagcatatgcatcttctggatccacattgcaccatccttgtttgctactgtttgttgttagaatatctaagtctggtttcgaccaatctgtcattttaggttcatcaggattcgtcggcgaactgaaaatacatgtcttaagttaaagagtttttaatcttgatttgagaagcatttgagactgtcaaagaaaagaatcaggtaaacttacttgatttga

SEQ ID NO: 50758 - DNA, 635 bp, Arabidopsis thaliana columbia
cgtccatggaggaggtgctgcgtgaggctgatctggtatatggaattcacgcagacacaaactattcttcgtttgttaaacatttctagtgtatctcttatgaactggttgtgatctgaaacagataagtcttcacccggtgctggacaaaaccacttaccatcttgtcaacaaggagaggcttgccatgatgaaaaaggtggtttcacttttcatttggtctcctcttattattattgatcttgttctgattggatttgattgcttcaggaagcaatccttgtgaactgcagcagaggtcctgtgatcgatgaggcagctttggtcgaacatctcaaagagaacccgatgttccgagttggtctcgatgtgttcgaggtactgtcatatacgctatgatgaacccaaaacatactagtttatctctgggagcttagtaagtgttgttaaatcacattgtttcaggaagagccattcatgaaaccagggcttgctgatacgaaaaacgctattgttgtcctcacattgcttctgcttccaaggttacaaactgaagaaacgtttctttgtgtctaaatagcacacacactatctttgatgaattccggatttgagtctctctggatggagcaatg

SEQ ID NO: 50759 - DNA, 640 bp, Arabidopsis thaliana columbia
tccctgttctctactcttgttaaatgcaggagaatgctgttgttataaactcaattatcggatggaaatcttctataggtagatggtcaagagttcaagctagtggagattacaatgacaggcttgggattaccattcttggtaacttcattgttttctttttgttcaacaaatttttcgttatattttttcctgattaatttgtttctgcaggtgaggctgtaactgtggaagatgaagtagcagtcataggaagcattgttctccagaataagactcttaatgttagtgttcaagatgatatcatgttgtgatttatcacaatgattatcgtttggattttttttctttttaattgaaacagagaaacttttacagaattgtgtattacatgaattgagttcacaggattagattttgagtaagtgaaactatggaagatttgtaaactctcactgtactttgtgtttagatactaaaaagattttagaagaaagagttttaaaagatctaagataacaaggaatcaaagaagttttgctccttgattgtgtaatcctagtgtcaatcctccttaggctctttcttttgtgcaaatactcactagaaaaattgtttacttgacttcgtttgtgggggt

SEQ ID NO: 50760 - DNA, 506 bp, Arabidopsis thaliana columbia
tgctttttttaccttccagttttgccatttgatgttgcaatgagatttcttttgctaatgttttaaaataacaaagttgttgctgctagtgtttccaagttgtgtttgctgaaattagggtttgtaacttataagagaagcttgatcgctgctttcgactaaagggaattcaataacaacaagtttacttgaagacaaatattaaaacctagaagacaagagttacacctacaaataggataaaatccacataaatttctgttactaaatgtatcatagttttgtttcttctatgtatctacatatactcaaaaatttcaaagcattgtgacttaagggccagaagacaacttgaagaaagattaaaacctattagcaaagagttaaagatccacataactttctgttgctgaatgtatcatagtttttggtttcttctgtgtcatatatacagactttctacagaactttttgagcacaaagcattgtgactttagagccacgag

SEQ ID NO: 50761 - DNA, 579 bp, Arabidopsis thaliana
gaggatgcatatcccttttcatgaagaataaagagtcagagttcttgttttcaactattgtctcaccgattctttagcagctgacattgccaaaaacccagcacccatctctacttcttgcaagcctacgacaagaataccaacatctgatgctacagagcctaaccaagacataagcgcatcatgggaagcttttccctggccaacattccatgaaccagtcagaatcctaacactgtctgtctgagcatatgtccgttctttttcagccagttccgaccttattatcccgtcaagaggcccaggagaaatcacaggccatccacgtataccaccatgagtggctaagctgaaaatgtagccatcggctgctgccatcttaatcactgcgttattatgtgcaacccatcccgcgattagattaccttcgagatcaattatctggatgtgaccactaacataaccaatgtatatcctttcccgaacgtgcagaaacacagtacagcacattgatggtgacggaaatcttgcaaccggtttccatttccgtcccattgtataagcaatccatttgtgcag

SEQ ID NO: 50762 - DNA, 474 bp, Arabidopsis thaliana columbia
cttcgatggggatgttgacaaaaataaaaacgacaaattaacttaattatggacgttacgttgcttcgatgtctatctgtaacaacaatacaactgccttaacttagcttaacgtatatagtaggccctcagaacaagagtagaaatgggggcacgtggccctaaaatttagctcaacctgaaagtgagaccagatccacctaacttgtcatccactaaggctgacaatctttccacttgtgaaggtgacaaatagttaacccaatcactcacttctcctttccgaaacaagaatcgattctcaaagttcttgatcgacttgtttgacttgttcacctccaacttcttcagattctcgaagctacacagctcggcgatacgttctacaactccctttcgttcctcttcttcggtgaaaggaagctctaagaaagttgcaagcctcttcaagttggtctcgatgtcgtctttgag

SEQ ID NO: 50763 - DNA, 570 bp, Arabidopsis thaliana columbia
aaaaatgacattagtatacggagttctctgtttcgtctgtggttcgcgtctgattgagtattaaagccatgaatcgaaaattctaaccctttatgtggtgagagaactgaaaagaaaaacttaacccttttgaactgtgttctgttggttgtttgattgaggattaaagttctccatgtatagttacgacttacgagtgtaatccatcttaaccattaaagaagtagacaccaaaagtttgaagcttttgctagagttctgtttatacggttgggataatagaaaactttgcttattggttaggttggtgggaaattaactgcattggaggaacatattgccgctgcaaagtcgaattgtttgtttgaagggactgacttcaagcttgcatcttgccatcatcccttgaatgacaaagttgctgaggaatgtgggtttacatcactctccatccgagttgttgaggttattgtcttatctttcttaccagacatagttaatgttatgttaagttcttatctgtggaacacgtaagattcatttgtggggatgataaaatatcatgttatg

SEQ ID NO: 50764 - DNA, 459 bp, Arabidopsis thaliana columbia
atgcctcattattaatcttcacctatgcagattcgcaaagaaaaagctatctatcacaccttgaacatgcttagtcttgatgtgactaagaagtgccttgtgggtgaaggctggagtcctgtctttgcagcaacagaagtgagttactttagttccatatagttaaaatgtttgcatatttattagtgccatagtgagtttaaagttttgcatctgcagattcaagatgcattgcatcgtgctgcggttgactccaattctcaagttggatcaattttccaagtcctgaggaccaaagagatgcctccgacttttttccgcacaaacaaatttactactgctttccaggaaattgttgatgcatacgggtaagcatcttttctggagcttcatctgctgtttaggaaagaggaaattggaattaggattggtaataagtaacattcttataggattagc

SEQ ID NO: 50765 - DNA, 557 bp, Arabidopsis thaliana columbia
tgatcatggtgattgttttctagctcagaaaaggatttagttttagcagatttttgtttgcttctatctggatttgttcttctctggtatgtatgtagcttgacgcagtgtgttttcaactgggaataaatacttccttcttcgataaagcatctaactttaattcagattctgttttgtgtatagaaatattgttcatgatgattatttgtatgtactagaattgtacttccacgctttcatgttttctagtttggttgcttgattagggttggcttatatttactcaagatacttatcatgcaaagctcagaatttcactttaagtgatgtatgttatagataaagtttcaggctaaatatttgaagagaatgtggaacgtattaggcgatttgaactatatgactgttagagtaagcgtaatgagctcttttgagcagctgatctgtgatatgattacagcaactagatttcataggaatatatgagaattacagccgagtttcaaaacttctattgcacacacaatattgagactatatgtacctttagtgtg

SEQ ID NO: 50766 - DNA, 546 bp, Arabidopsis thaliana columbia
ttattttccaaaacttgaattaattatgaacagacggagtaggaaatttaatagtaaaaggaaataatttattgttttgcaaaaaagtaataaatataattaaattatacttaagtactactaaaaatatgaaaaaaacaaaagacaaaattaagacttaaaaattatataatgtctgccgtatttaaatagctttaccgactttttcagagcacaacctccaagagacaacatcaaaacccagaaaactgaacgctttatctgctcttcaggtttaagaggtttagaaagaaaaagaaaaaaataaaaaaatttggttggttagctggtcccgcgagtttttcttggagttcacttaaatccttgcgatcaatttgaaaaatccaccaagaatcacacaaaaactgatctctgtgcgtctatataatgaagagattcactgtttgctgcttctcaaacaaaatacataagaacggagatcgaaatccagacaaggtttgtcttttcccttaacaaagaagattaaatctttgtgtgtttcttaga

SEQ ID NO: 50767 - DNA, 814 bp, Arabidopsis thaliana
cacttccgtaactccttcaaaacaacgtcgttaagatcaccttcctcaaaccccaagtaattcctcaataaaatcttgaccgaagaaaacgtacagtaactcatgtgtatatgcatatccattcttccacttctaagcaatgcaggatcaagcttctcaatgtgattcgtcgtgaacacaaaaatcctctcgctaccacaacaagaccaaagtccatcagtgaaattcaacaaacctgaaagcgttatagtgttcccatcacccaaatcatcacctaaaccggacccggttaacatctccggttcgttatagctccctgtgctctgtttcttgttacgattcgttaaattgatagaacaatcaatatcctcgataacaattatcgacttggagctagtcttcatcagaagcttcctcagttcagaattgcttttgacctccgtgagctcaagatcgtagatgtcgtaccggagatagttagccatggcggcgatcatgctcgacttccctgttccgggaggtccatagagcaagtaacctcttttccaagcccgaccagttctctcgtaaaaagattgacactcagcgaaatctttaagatcctccatgatctgttgcttcttaaccggatccatagcgagagtatcgaaagtactcggatgcttaaagggaacagattcccaaggaagacctctagaatcaagagacccacctcgtgaattcgtgtaaagaagccgatcttgattcaaccgacgaatctcgttagctttctccatgatgtaatccaagtaagaatcaaggatcaagttcttgt

SEQ ID NO: 50768 - DNA, 1121 bp, Arabidopsis thaliana columbia
gtgtcacatcacggatcacatcagcattggttcgtatatcgctgataggtggtgaattttccaacggccttatatggaacatgtagtcatatttctcccaatcaaccgtgaaaccctaattaagccaaaaaagacttcttatcagattccgattttcgaattaaccctaattttgaaggaaaggaagcttaaaaattaaagttgaatagtacctcggatttatggaattcgtagtgaaacaaacaatactgtcgaagatactcatcatcttccacgtttcctagcttgagatgtttccaggacgatttcgatccttcgcaagctttgtccaacttcgggatcttttcaggccggccacagttaacctccttcaaaacagagtccgccatgattagatcggaaccctaacggctaacgcacacttagcgagaggtgaatgagagagaggtaatagaagacaattatcgtgtttgttttcttttttgaaatatagatggatgaatgatgatgatgatttgagaaaaaaaaagctcatgagaagcccatttagtagtgaaagagaaggctcaaatattagatgaatggctcatgagaagcccacttaactgggctcattagaagcccattaagagtgaaagaaaagtctcaaatagtcgtctccgtcattgtcgttgctttcctcctccttctcctccgtccagtgtcatcactgtcatggcgcccagaattttactctgtggagatcctcttggacgtctcaatcagctcttcaagcgtgtccaatcggtctctatcactatctttctccttctgctctccgatttcacctgattctgtatctccaatttttaaatcgaactccaatttttgcaggttagcaaatctgctggtccctttgatgctctgatttgcgtcggacagttttttcccgattctccagaaattctagatgagtttttggattacgtcgaaggtcgagctcaagttccgattcctacttacttcaccggagactatggtgtcgtcgcaccaaaatcttatcgacgacttcgaagaaagctgagaatcaagggtttaagatggatggctcgaagtttccacaatttgttttggtaagagga

SEQ ID NO: 50769 - DNA, 640 bp, Arabidopsis thaliana columbia
tttgtctctatccaaagccacgtgtcttctattgtagagaaaccaatacacgtattggatgagaatccaaagttttcccgacttcatcctttgccgtcaaacatcgattctggtgaagattcgacgtcgattaacaaatcaaacatgaaaacttatgggttttcaccggttaaaacaatcaaagctccaattagagaaacaacagctcaaggcaatgttaatatgcgacggaaatcacttttgttcttcaactcaaatctctgatttgattcctgcacttctaaactcaaaaagaaaaacaggttggataataagtaacagaagcgaaaaccgctctatcattatcaccaacacatctcaaatgagaattattgaaaacaaagctaatttatgaaaaaacaaaaagcagcaaaagaacgctgacggcatagccgaccatcatcactgtgaaagctgaatgataccggacaagagctggccaacaccggaaagaactggtaattgccagacgataatccctatcagagaagacggtagccggaaaaaaattcggacggcaaagtgagtttgaggtttctctctctctgaaagaatttagaaagagaagagagagaaaacacgtcctggtcgaggaatcctg

SEQ ID NO: 50770 - DNA, 735 bp, Arabidopsis thaliana
gaactacgtattcgtagcggttctaacatgtacagtggtgttccaagtaatcataatcgagctgctgggtacatttgcggatacaacaccattaaatttgggacaatggttggttagcatcatactcgggttccttggcatgcctgttgctgctgccttgaagatgatccctgttggttcacactaagcaacacattgtataatgtgattccttgtgccacaactttggcattgaaaggtaccaattttttctccggcctttggaagtttgatatcccaagatggccttggactagttacggtgcttttttatgttttcattttggccaaatgtataagtgatttggaggagcatttgcttcgtaaatatttcaatgttgtggaacttgttactttatcttttgttcttctgttagataccttttactgaataagtgaagcataggctaaattgtctctcaccaatacatgggctaaattttgtctgtcaccaatacactgacaaattttcagtgacaattccgagtctcagctcaaaatacaattggtcaatggcactcttaacagatacaacaagtgttgaatcataggaattacactcaacggtcgaaaattgttataaatgaaaagacatttctaagagttggttataatattggaaccaattatcaaatcaaaaacatgaaacaagaaaaagtgtactaatggaacaacaacattttccaaaagcagcag

SEQ ID NO: 50771 - DNA, 458 bp, Arabidopsis thaliana
ttacagctggagctggaggaacagatgcacaggttattattatactctcttagaggtttgtgtgtgtttgtgatgtgaattgaggttcttttaaaacaatgataactttcagtgcaggattgggctgatatgttgcttaggatgtatatgagatggggagagaagcagcggtacaagacgaaagttgttgaaatgtctaatggagaagaggcagggattaagtcagcgactcagtgaaatggcggctgtaactgcatcatcacatcaaccttagccttatcaacctctattccctcttctgtaattgtgtgccccaaaacgatgccttctctaaccatgaaatgatatttctcccagttcaaaaccatgtttgtctcttcacatcttttgagtacctgcacaagttcaacaaatacgaggagaaggaagaggcatacacagaaaaatcatccatgaat

SEQ ID NO: 50772 - DNA, 539 bp, Arabidopsis thaliana columbia
tcgtaattaaaaaagtacataaagaaaaacgcagaaaatatctcgtggcccttttctatccaaaggagtctcgtgtcagaaattgcatgtgacgagtaattaatattcccattcgtttcaatatatatgaacccatattattttctttcacgcatcattgataatcacgttcacgttcacatatgttttatttatatttcctttgatcacagcgtaagtatttaccaaaaaaaaaaggtaagtatttacccaatttaacgttcggaaattaaaatgcaaactccttccattttttacaattacacactaggaaaaaattacttgtcatcactcaccattacactagagaaagcaatatctttagggactaattaggtttaaatgtaatataacaacaaataaaccctgaccaaaggtggaactagggattgaagaaaatacagttaacacgtgctttgagtttgcagattctcttgttcgtgcaagagagagggagagacgagtttgaccgttgaccggaaaagaagcgccggtaagcg

SEQ ID NO: 50773 - DNA, 552 bp, Arabidopsis thaliana
  unsure (1)..(552): unsure at all n locations
gacttcttatcctgacccgattcacccttttccccaataaccctagattcatttctctttctcaaatccgagaaaaccctaatcaaatcagatggactagaactcctacctcgcaaaccagatgacgtggatcgcgtaacccgaccctcgccactcacggcggacttatcaatgcgcggtacaggccggagcactggcttctgagtcgatccaaatgagcggtgactaagcttcggattcggattctctttgctggataatgatttctgaagagcgggatttgaatttttgcttgagatcggaagtggagttacagacctcaatggttttttaccagatgatggattttcaccggcgccggtgtttatatcttttagccggcggganttcgttgaagctgacatctgcaaaatcgtagggtaaaatgatttaggattttgaaaaaaaagtttgggggaaaaataaaagcttttgatttttgaagaaaagcacaaaacgataaatggaggatacactaccgcaactcacaagccgacaaatttattagagttc

SEQ ID NO: 50774 - DNA, 783 bp, Arabidopsis thaliana columbia
ttgccccagggacttccctattttcattattagtctctgtacgttttttaggtcatatatatagtttaaaagtcattgtttagacctaagaagttcttttctagacatcaagcttattatcaatcttccagagcacttttcataagctattcatcccagtttttagattttcatcagagatttaaataacagtgaatagatcttttctaactcttttctctattgatttgtttttgctttcttattcatacatgttgtttatctcatccatcatatcaaagtagcctgcttggtagggttagggtttctcactagagattcatatgatttagtagatcgcccccttgctaggttatctgtaggattcttcatcttttgttgttcttaatgctagttcaagagtaattaactagaacttgttccagataatagatataccagccatagttatctgttactagaactgctatttgatgagcatggtttataggtgtgtaataagaatcggtttatctactaaggtgaacttatcgacttgtttagcatgcatgtttaggtataggatttcacggcacatcactgggaatcttagctctaggcatagtgattttcacggaacatcacctgttattctgatctatcgcgaagacaaccgctggcgagtggggactattctgcgaatagggccaaaatcgtttcagaacggtgaaattacttccatttctgactaaatttagtggtcgaatgggcttttcaaatgattgctttgttctttttgctgca

SEQ ID NO: 50775 - DNA, 738 bp, Arabidopsis thaliana columbia
atccacagcaggatagataccgagctcagaaatctacataagggaaagagacgagcataaagatatcagctttatgagcattacacagaaatatttttaaaaaggaaatatcaggagacatgttcccacctgtcttgacagcacggttgtggcgtccaagtgagcaaaagttgtggcaggagcaggatccgtcaaatcatcagcagggacatagatggcttggactgaggtgatagaccctttcttggtggttgtgattcgctcttgcagagaccaagatcagaagccagagttggctggtaacccacagcagacggaatacgaccgagcaaagcagacacttcagagttggcctacacaagaaagtatataagtttagattacaaaactacagagttaagattacaatatagggcccacaggtactgagtgatatacacaatacataacaaggcttacctgagtgaaacggaaaatgttgtcaatgaaaagcaagacatcttggccttcagcatcacggaaatactcagccacagtcaaaccagtcagtccaacacgggcacgagcacccgggggctcattcatttgtccatacactagggcacatttgctctcagactgttaagacaagtaaaagcaagatttgtagcgacataaatcaatcaaatgccgtttgcaggaaaaaagataggtgaagagtaattaacatgaattgaacctgcttctcgctagcttgat

SEQ ID NO: 50776 - DNA, 523 bp, Arabidopsis thaliana
ctttacacagttaaatcgggttattggcttgcaacacacctccacagtgacgaaccacgagcactacccccaacaggagatccacacctgaaaagaagtatctggaaaacgacaacgacaccgaagattaaacatttcctctggagaatgctctcaaaggcacttgctacaggagaagaactcgagcgaagacacatcaatccggataagtactgcaaacgttgcgtcacagagacagaaactacagatcacctatttttcacttgtcctcacgcaatgcaaatctggagagcatcaaccattccgattcaagaccttacagactcacgagtaagcttagaaacaaagatgtctataatcttcgaatggcacaagcaaagctcgaacaatcagttacaggcacaacttcccttctggattttatggcaaatctggaagaacagaaacaaactaatattcgggagagaagcacacacgtgggagaaagatctatcaagcgcacatcacgatgccgaagaatgga

SEQ ID NO: 50777 - DNA, 502 bp, Arabidopsis thaliana columbia
cgaccatgtaagacacccacaatttttctagcaattttcgatagtcattttgatatcaatttttagcttttacattttatttttgtcctcaaaaattaatccatctcacaaaacaaataaatacttgagcgtgtgaatccgacatccacaacacttttgcctgaaaaaataattaacataaatgtaaagtatcctaactttcccattttaaataatattgtttattcaaactatctttaaaaagttttgacaaatatacacccaaaagtatatttttgaaaaatctaaagttgtaaggtaataaggtaatatatctaaggtagactaaagatatattgaataacaaataaaaaatctaaagtttttaaatgactcaaaattggacggtatagatgaattctaacgcctatccactacaagaaaacatgtgattgacgacctacaagtcagtcgtttagtagtcgtaacaaaagctaatacgactaatttgcgactaatgact

SEQ ID NO: 50778 - DNA, 545 bp, Arabidopsis thaliana columbia
catcatttctctccctcttttccctcacactctttttcacaaaaaaaattcttgtagccatatacatcttttctctcttatataatggattctcatacttggtaagaaaaaaaaaaaaaactttctgtattattctctctttatatttactttagctatattctgttaattgtttttcattcatcttttacgggtttgttcatcaaattttaacgatcgaaggttaaatattttttcataatttgtttcataatcacattttcaatgttatcataaatatactcaataagttctttcagcaaacatttttctgtaccgcttattttgtacaaaccgcacttgtcccgcatatatgggtccgaatggtaaccgcggtttttgttgtgcgggaaaagcgttattacagtgcagtacggttcaactgcggtacgtgagggagaaatatatttgcaagacaagtgcggtttgtacaaaataagcggtacaaaataatgtttgattggtgaaaaaactacttgcggtgcggattatagattatatatata

SEQ ID NO: 50779 - DNA, 572 bp, Arabidopsis thaliana
cctactccgacaaaccaacggcattccgttcaccactctcacagtgaatggttttgttgttgtggctttgagattcattccccgaacagctttctctccaatgaaattgtgagtagaaccgctattgatcaaggcaattagacgattcctatggattgtggctcgaactcgtatggtgctcgtagtgtcaaccccttcgagcgcgtacagtgtgatttctggtttcccctctgcttctgtactctcctcctcaaccgcttcgtcatcattctccccttccataacgaatagttgaggttgtttacatttgtgtcccggcgtatacctttcatcacagctgaaacataagcccaaactccttttctttcgtaattcttcctaactgagtctctttggcgtctgttactctgtctctttgcgcaccaccagacggttagggacaaaactgcgtggagatggtgagtagctcgtttccttcttctgtctttggatttgccttccatccaacgcgcaagttgattacttctctcagagatcgaggctggaacatgcgaatcccattagagatggag

SEQ ID NO: 50780 - DNA, 505 bp, Arabidopsis thaliana
tgtcagttgagaggaggtgagacctctatcgagacaaatctaaacgagtccttggagtatgatctgtcggggaagaggctcctgtcagatctatggagttctgggcagggatctcagtttcctgggaagggatttcctttcccgcgaggtcacgctctgttacttgtgccatgcgggtagaatcgcatttctactgacctactatttcagcgaggttctggtgcccaatttcttgatttttgcttatgttgatcaggttcaggatcattgggcagagttcggccatctcgattgcaggtctcggaggcacctgtttggtggggttagccaggttgagcggaggttggttatctctgttgggaggcggctgtatcgagacataatgttccccatccttggtttgcgaggggggagaatttgttcttattcggaagaattcgaattttggtagaggttctcagcattagtgtcacggatgtcaggtgaccagacttattaggccaaa

SEQ ID NO: 50781 - DNA, 580 bp, Arabidopsis thaliana columbia
ttcgcgagtctggtcgtccgtcgcaactagcgagaaacttgcgagacccgaaatttgctgtgaatttgctacggattgcttccctcgcaaattgcgtatattttgcgaggcaacttgttccttgcaacatttgcgaggaacttgctacgaatttgattttgcgacgcgcgttttgcgaggaactggagttcgtcgcaattccctcgttaagtgctctttgcgagggactagcgacggtttcttccctcgcaactggcgtgttttcttgtagtgtgttgaaattgcccaaaatccttacgagattcttatgaactatgaattggaataatgaagtgttaagctgccgaagaagtaatgctccaaatcttcaataatgacgatttagcaatataagaattgtatttcacaattatcaatcgaaaaagagaaataataaaatcggtggtgatgagttaatattttacctacacagaacccgattgtcaaaggaaaccaaggacaaagaagatgatgttggagaagaaaaaccgtgactagtgaataaattgcctaatcgaactaatatccacgtgggtatgaa

SEQ ID NO: 50782 - DNA, 554 bp, Arabidopsis thaliana
aaagctcaggctgcgcgttttgtcttagtagatgaaaaactttacaagtggcgattattcgggcccttgatgacatgcgtggaaggagaagcgatttgcaagatcatgaaggaaattcacggcggctcgtgcgaaaatcattctgggggaagggctttagcattaaaataaaacgccacggattcttctggcgactataatcaaagactgcaaacatttttcaaaacgatgcgaaaaatgtcaaaggcacgcgccaacaatccatcaaccggccgagctcttgtcatcaatcgcctcgccgtatcccttcatacgatggtcaatggatataattggacctatgcatctctcgaagcaaaaaaaattagtcctcgtcctgaccgactatttctcaaaatggatagaagccgaatcttacgccagcataaaggacgctcaagtcgagaacttcgtgtggaaacatatcttatgtcgccacgggataccttatgagattgtcacggataacgtatgagattgtcaaccgcttccaaggcttctgtgataagtgggga

SEQ ID NO: 50783 - DNA, 309 bp, Arabidopsis thaliana columbia
gacataaaacaaggagaattcttacttatatgctctgcatcagtaaaagtaaagcttctagtataatgcaagtaatcaaaaagagcttcttgagcttgattcctactagcccttgataccggattaacgaaaaacctagttggtaagtgagacgagtgttgttgtaacttagatttatcctgacgaacacagctttcaatctgaaaactccgaaatggaactgaaacacgagaaaggtcgaacctttgaactgggttttgacgaggaatagatgagaaagttatacagtagttgagatttgaaatcata

SEQ ID NO: 50784 - DNA, 1091 bp, Arabidopsis thaliana
gacacttgcagggtcgaaatgatgattaaatctctaagcttctggttccatagctcaactgcacaacattgtacaaataatcaaaggtgtgagtcaaatcaaataatggatatcaaaattgtgtattttacaaagttttgtttatgaatctaaagaaatgagccagatgatactgtaaattgagcttctttgatattatcaatttttagcttatttgatgagaatcaatgaagatgacacagagcagcaaattcctctaagactaatcaaagcaagctcatgaagaatctcaataaccatagataatcaattgcaacaagctacattgctgaatattactagaattcacttacccttggctatcgagattaccatggccgctacttcctccacttccataagacacatcatcaccaccaccagctgaattctgccaaacgctttgccatgcctgagaaggaggctgagcataaacaccgctaggatccatcgccggtcttccaatcatcatccctccaggaaccgccggttgtcccatcggtggataataataaggaacaccgctcgcggcgggagcaaccatacctcctccaccaagagccgatgctgcatcttcctcttccttgatctcttccctaggaacaatatcaacaaggaaatcgaagatatcggttctagtaatcgcagcagcgatatcgtttttctgaagcgtacgacgtttgttctcttcagcgtgaagccaagatctaatcgtaagttcgagaatgaaaagctcacaagctttcgcgaagagaatcggtgcttcggcggagatcatacgcacatcttcatcagctttcatgatttttttgatacgagctagagggagctgatggtttttgaaatcgtttacctgttcgatctcttgtctctggtatgtccagaacatttgaagctgttgctgttgttgctggaggaggtggtggtatgtcgctcctcctccggtgactattgatgcagatccagatggtggaggagggattacggttgtgacggcggacgaggtggataaacggaggttggtggtggttgctggttgttgttgttgttgt

SEQ ID NO: 50785 - DNA, 331 bp, Arabidopsis thaliana columbia
cttgaccgtcatctctagagcggcgatttcagaaccgggtctggcgcgcttaacgggcgtgaaagagatggccagtgcgctaaaacaggcacaaacgctcacaaatggtcatgtctatgtgacccagggtagcgcaggctgcgacatgagctggacaatggtggacgtcagagtcaaccggccttcaaagttgatgtggtagataccacaggtgcgggtgatgtctttcacggcgctttagctggtggcgctggcaacaagtggggatttagcggcgtcagtccgcttcgccagcagtgtagtgacgttaaaatgcagacgttccggtgga

SEQ ID NO: 50786 - DNA, 1566 bp, Arabidopsis thaliana
tagttgtttgatatagcaatgtttgcaaattgcgatatgaaaacaattttcaaatcttgatgattacaggattagagattgtttatcattccaaatcctaaaaccttaataaacagagaaatcttggactaacatgattatatcccaaacaaaccagacttagagattgtttatcattccatctcctaaaaccctagacgatcatgtaatcaatcaatgtatatcacattgcacagaaaatgaaactttacccttggccgtcgagattcccttgaccggaacttccaccactaccataagagacatcatctcccgtccccgtcgaagtctgccaaacactctgccacgcctgagacggaggctggacataaacaccattcggatccatagctggtctcccaatcatcatccctccaggaccagctggttgtcccatcggcggataatagtaaggcacgccgctcgcggctaggagccgacaccattccaccaccgaggactgcggcttcgtccttaatctcatctctaggaacaatatcaacaaggaaatcgaagatatcagtcctagtaatcgcagcagcgatatcgtttttctgaagcgtacgacgtttattctcctcagcgtgaagccaagatctgatcgtgagctcgagaatgaaaagctcacaagctttcgcgaagagaatcggtgcttctgcggagatcatacgaacatcttcatcggctttcatgatcttttttatcctagctagtggaagctgatggtttttgaaatcgttaacttgttcgatctcttggcgttggtaggtccagaatagttggagctgttgttgttgttgttggagaaggtggtggtaagaagctcctcctcctgcggcggagatggtggttccaggtggtggaggagggattccggcggcggagggaggtggttgctggttgttggtatccattggtcggttttggattttgatttttggatcaaaaaggtcgtgacaagtttttgccaaagggattggggtacaagtggataaggtggacagcgatgtagctgatgattttctctcttttttttctatttcctaaattaatttttttctattttctatttcaagttaaattttgttttttttttacacgtaccaaagttcatatgcatccgaaatgaaccaaaagaaaacatcaagagtgaagagagctgtcaggaaaatgttgcatcaagagtgaagagagctctttatttccgactttgtctttgccatcgagtatcgtcttcaaggtatcatcgcatcgtatccgccatttactacacttcgtaatctacaaatgaaacaagtgagctctaaacaaatcataatctctaaacatgaaaatgcaatctatgaccaccaaacagagaagcaagcacaaggtccaaagccacctaaagacactctatattcgtaactggtgaattcttcatctgacagtgtatgaattgacaagctaagttttcaaaatatgcaatcagaaaagaccatttccacaaacaaaaccaaaacattcaagtgagtaacaacattttca

SEQ ID NO: 50787 - DNA, 547 bp, Arabidopsis thaliana columbia
atttttaataatcaaataataaaggatcctagtttcgaattagtctagtgggtgtaccgaatcaacttaacccattgtgagattttcttttttttctccctcctgctgactctaaacctaatattagtttccactttggtaaaatataataaattgtttaattgctaacgaattcacgaagacctctgttgtttcccgcttagtgtgtataaataccactccttccttttctccaaactcatctcacaaatctccaacacagagagcttctcacagtgaagcaaacaatggagtcttttcggcgattctccttgctatccttcattgccctacttgcctacttcgctttcctcgcttctgctgaacatcacgtccatcaattcgtggtaagctagctactaatgttacattaaagctttttggtatgttcttacgtttatagaattcccttaatttaagtttaaacgacgatgactttagatcacaccgacaccagtgaagaggctgtcagaactcccaaagcatcactgtgaatggtcagtacctg

SEQ ID NO: 50788 - DNA, 1030 bp, Arabidopsis thaliana
catcatttctatttaatgaaagaaaagacacaacactacacaaaatggcagataagtaaaagcttttgttgtgaagtgaccccatctcatttgaattcttcctcaatagccttgtcctttttacttacttcttcacttcttttgtttcttatacatcaacttgacatctccaattctatacacacacacatatatatgaatctaaacatcactaagtaaagagagattaaagccttttagattagaataacacaaagaagccacacaagttcaagcaccatacatagattaagacacttaagagaggctaaaaccattcctagttgcaacttttaggtagagacttcgaacataacaaggcctggttcatggagatggtggccaaatatgcggttccatgtctaaaactgcgttttccgcataaaaattatcgtcccaaccatgctcaaactcatcctcatagaactctcccattacaccatcttcaaaaaactcccaagccaagtaatcagacccatctgagaagtaatctgagcagcaatcctcccaatcatttatcatatcatagaatccgatcacgcgtggacctaacactttcatatccggaaacttctctttgaaaaacttgttatcaagttgcacgtcccaacagcctctaagttccaagaactcaagaaaaacacagcacgataagatcttgagtactccttctgtgctgactcggtggtaagctatctctaaccgcttcagcttcggcattgtattggcgatagcataagcttcatcgtcgtgagagacaacacttgctacatccaatggatgcatgtttctgcaaaactctctcagtgatttacagtgttttcctatggcttgtatcgcctctgggcctattttgcagcagtagctcaaatccaagaaagtgagagacgagagcttttcagctacgtttaccacacccgaattagtcagaccacttcttggcaccttcaaggtcttaagtgaaccagcacttaccaaacaaaacaagaaa

SEQ ID NO: 50789 - DNA, 560 bp, Arabidopsis thaliana columbia
gagataaacagaataagcaagtacagtaatcattacccttcaccaacacaaatgtaagaatagtgatacgcactcccagctgaagggcaacgactagagagttcagcataacaaaacgcagaaagaccagcagcaattccagcaataagaaaagacaaagcaagagaaggtcctgaatgctctctcgcaactgttcctacaagaatataaactccagctcctattgttgctccaacacctatatatccatacaaaagtcaacagttatatattgatttcacaataaaaaaactaaactttctcacctatatccccataaattgatctcaaaaagaatcagactttaaattatatgtatttcacaataaaaaaacaaactttaaattatatgaatttcacaataaaaaaccaaactttttcacctgaatccacatgaaatgagcacacaagaatcaaacttgggagtgtttataagaaacactagagaaataaattgagaaatgacgttccaattgcaacgagatgaggacagtgagggcctacaagttggtgacatgaga

SEQ ID NO: 50790 - DNA, 576 bp, Arabidopsis thaliana columbia
cttcttgattgcaactagtggaactaagagcaactcggattccagtggctaagaacctctggtgattagcagacgagtatttggcgcatgggtcgcctcatcgcaatctctgcagagcagagccctatcctctacacagaatatgaaagctgccttctcctgcaagtcaacaaagatgaacacaagaaagagatttactacataagcaactttgagcatgtttttcttgagatcccattaagaatatctaccaaagttggatctacatatccaaccttagcaaactaaaaacatccaaaaacaaacaaatttcctgagatcccactaaaacctttactaaacttaaatctaaaaccttaatctatgttataaagctaagaacttctcgataattatacttaaagaatctaccaagaacagctcaatcaaaagataccctcaaaacaaataaagatctctgcagatacgaatagagacaaaagagagaagaggaggtattcttacaaggcagatgtcgcagggagggaatttagttgagagagagtcaagaaaaaggcgttggtgtttgctagcgag

SEQ ID NO: 50791 - DNA, 551 bp, Arabidopsis thaliana columbia
tgaattttagtatgtgtaattatgtatagtagtaattactcatcaatcatcttaaaaacctttttttctggtgatttctagttttaaagtttttacctatgattttgtcttgaggatgtctaggctttacaatatattgaaatatttatacatttaaaataaaatctataaaacctgaagaaaataattaatattctgaacttcattttttgcattttgtgtataaattaaaaaaaaaagaaattacttgctacgtgatttgttgaaaaaattaacacgtggggtgttttatttttgattacatgaacttgtgaaccttgtttctgcttacaaaaactgaagagcccatttcaaacaaggcccatattctgattgagcggccctattttaccaaaccacctactaatgaacactctcaagtcacctcattcgagttggaagtccctttaaaacaattattttcagacacagagagactcagacaggagatatgaactgcggaggaaaggtggtctgcgttaccggagcttccggctacatagcgtcttgga

SEQ ID NO: 50792 - DNA, 482 bp, Arabidopsis thaliana columbia
cgtcctgagagtaattccagtagtaccacaccgaaactgtatacatcgctcttagcagttaatcgacctgtagatgaaaatcagatatgagctaaagagttctaagaagatagaagtgaagtgtataagctgcaaagaagaaagcttttgaagcaaagtactaagaacgctttgaaacaaagtgcttaaatccttttgaagcgaacgtaagggtattgaggaaaaggtctaaagctcttaaagcaatgggataaagctttttagaagcaaaggccaaagcttttgaagtaaaggccaaggcttttgaagcaaagagagactaatgtttttgtagcgaacagggtttaaaagctaaatccaaagtttctcaccatattgctacatattccggggcagcatatcccgtgagtacccatgactatgtgtggacacatgagtcttgtcaccggtagacctgctttagctagaccgaagtctgaaag

SEQ ID NO: 50793 - DNA, 758 bp, Arabidopsis thaliana columbia
acaaaaaagttttttattctccaaaaataaaggctgactttttgcaaacttcaaaaaattgtccaatccttcataaaaagcttgtgatactcgattggttgtaggatcgattctttcatacatccaatgcctttcagcatatatattcctatttgaagacatgataacctgaaaatatagttgagaaaataaaataaaatttctggatggaagacgtaattcaatatgacacaacaaatcaattcacgttactactccggttaaccaattaaaccaacgttttctaataaaccaataattgaccaagctatcatctccttcacaacaaacaagaccattcacttatacgtgacaaacaaaaccaacaatagtctcggtttaacgattcttatctatttaggaattataaaggaattcttagactattatacgacaattatacgacaattcttatacgaaaacttttataaaacttttatacgcaaacaatgatattagtacctgcaactaaatagataaaaataaaaccgagagaaatacaatcaacaatagtctcggtttaacgattcttatacgtgacagacaattcctttataatcaagttttcgtataatagtctaagaatctgttgatttaatttggtttgtgcttggtttaagttagggttttattttcatatcaacctaaatcattaacaaacatgagacatgggtttgttggaatacttttctctccaactttgacggattggactgatg

SEQ ID NO: 50794 - DNA, 654 bp, Arabidopsis thaliana columbia
ccaaacagattaacgcagcagctacttacttacacctttgtagaggaggcgaggactatcattctcatcagaattttttgtttttagttgaaaaacatttttatacaaatgttgtcttaaagacaaattccatggtctcgactcgactctcgaggttgctataaagaattttatttgaccaaacaaagtcttaacatgcgttttgaccgtaatagtaatttagtggtatctaactaatgaaaacagtaaaattatccaaatcatattctacaagttatcgaatactcctttgattcttgaacaacgtagcagtaacggtaatgaattaattactacaaaagttaggtaaacctaatcctggttataataaattagtgaatcaaatacttttgtgtgaccctttaccacacgaaaaagaaaaaaaaaaactttaaaaattgtttatatgcttgaaatcagaggtggcctctgacacgctttgactcggtctaaccattaaagctccaatataggaccatgcgaatttgtgtaataaacatctcacactttttatgcagcataatgttaaacggtaaaaatgttattttaatcccttaactttcaaaatgtgttcattttatttaaaacataaacattaagatttgaaatacaaga

SEQ ID NO: 50795 - DNA, 582 bp, Arabidopsis thaliana columbia
taatcatgttactgatttgagaaggagagaaaaagcttaccaagagattcttcaaagtcatgatcttttgcttagaaccagcaaacggaaacttagacaagccagaaatgagattttgaggtattttttatatatatttaaattcaattcatttagggaaaagttgtgtttgttctacttggtgatcatacaaactcaattatgtttttgactattattatggttgatatatgcatagctatactcctggatcatggtctgatgtcaagttgagtgattacaatattccaaaaacgacatcgatcatgctagttggtccgaaaggggctgggaagagtagccttgttaataagattacaagagtgatcgaagacgacgcgtttctcctagatagagctcaagaatcatgtaaattaagtatatatgtgtttgctatagtttctattttaaaggtgagattactgatgttttttgcgctctcatatcgcagttggtacccgtctaaaggaggaacatactttgttcaggagtatatgatctcgagaggaggttcgcttcattttgcgtatatgatacgcgtgg

SEQ ID NO: 50796 - DNA, 505 bp, Arabidopsis thaliana
cagatcttgttagctctttctggaatggaagagctttcaccttaaatcgaaaaaatctaaatactttaatgcctcagtaagaatcacaactccattacgataacaagtctcggtatgcaggagatagagatgaataccttaagtgatctaatctgtattagatgaccgacaatgcccatgagacgattgattaactctcctgatatttcaccttggctcgcatacttcaagaaaagaaaattgctactcttcttcatacatctgaaagattattaaaatttatatacatatttagaaacagaagagtttgattaccgcgattctagcaactttagcaagatgcaattttacatctcctggcaatcccctcttcactgcttgggaagagatatcggcatcttgattctgagtggcagcaggaggccttgctgcaataaattggatatgatagtttactaaatggtatttagcttctcatgcatgtagagaacaacgaaacagttga

SEQ ID NO: 50797 - DNA, 432 bp, Arabidopsis thaliana columbia
gaggatcacgatgcgtttctgactatgaagttcaattgcagtgagtgcaggtcagtttcgggggtatcttcagatgctggaaattctgtttcgtcggtggagagaactgttagttttggcattgcctcttcttcccggacggatactgatatgttctgccagaatttcatcttgaattataatcggaaagatgggaaaaaggatgatggagatgataatggttcttcagacacagaagattttgaagttcatattgatttgactgatgacctcttacatatggtattcttcttttctttcttgcattttaagataaatacatgtaagtatcctctgttttgtttttttaaaaatttgctttctttcagggattctcgtgcttgaatcatgtcgacctctgtcgctctgctatggtatgtcggcagtggagag

SEQ ID NO: 50798 - DNA, 676 bp, Arabidopsis thaliana columbia
gactccgggacttctctttcagattccggcgagaggtcgtgttgttgaatttggtaatatgcagactagtggagcgtcgattctcgtccacaccatcattttcttcggtcttataaccatcttcaccatcgccattcgtctccatatctataccggttaatttcaccgtaccggattcgtaacttcccccggttgtctagttttatggtttgttttggattttgtttcttctctgtgtcttgtcaaaacgttatgaatttgtgaatctgaatatgcattaagttaatttcaaaattcgctatgtttgattctcggtttggtttaaatctggttatggcgttgatttgaatttgatggtaggcactaggcagttagccttagtttggtttattggtattcgagttcaaattggaattgagtactaaaatgctctgttactcatttctgcatcttgagttcttatggatttgcttacgaaatgttcaattttgtttggtctggttcggttcgttctgaaacgaatgtcgagagtcttttgcttgactcgaaacttgccttgtgtcagcgtgtaggggtttgtaagaataaaatgggctttaaaattaagttattaatgggcgacacatgatcaccaagaagaagtgacccgggtgcacttagatcccatgtgatgtga

SEQ ID NO: 50799 - DNA, 680 bp, Arabidopsis thaliana
gatctttctacatacatgaaagacgaacactgttcactgattagattttgaaaacttgaacattcaaagtttgagagtggtctcgcttaaacttgacgcattacaacctcctaaaccattctttcatttactgatagaactagacaaccctagctcgagaaaccagatcctatttatcccaaaacccgaagaagagacatggaactcagagaacattatcaaagacattgtatctaaatctactaacagtggaagtaaacggaacacagatctcaacttaagtctaggcacattgctccaactctgaaatctagttcttctataatgcagatcacattgactttaaatcctcaggagaacttctacagattcatcagagaaaaacccaaaagcaaaatacgaaaatccatactaatggatcaggcaattacaaggggactgtgtatagttctcacttcatatataaacccacaaattgatcataaaaccaggaaaccattgaaacccatctcgagaattcagaactaaaaacagaggaaacaaaaacaagttgaaaaagaagagacctttcgcggaagtaagcaagaggagcgagaatagagagagcaagaagatcacggcatacacagaagacaagctggttgactcaacattaagagctactttagtaatcacatggt

SEQ ID NO: 50800 - DNA, 563 bp, Arabidopsis thaliana columbia
ctcatcgagcaatatccgaatcgcgtcgaaattgttcagcttgatgaatcaaatggtgagattcgttcagatccaaatctctgcttcgaacatccttacccaccaacgaaaaccagtttcatacccgataaagaatgtcaaagacccgatcttttagctacttctagtgatttccttcgtttatggcgaatctctgatgatgaatctcgtgttgagcttaagtcttgtcttagtagtgataagaatagtgagtttagtggtccaatcacttcatttgattggaatgaagctgagcctagacgaattggtacttctagtattgataccacttgtactatttgggatatagagcgtgaagttgttgataccagcttattgctcatgataaagaggtttatgacattgcttggggtggtgttggtgtctttgcctctgtctcagaggatggtccgttagagtgtttgatcccgtgataaggagcattcgacgagtatctacgagagtggtgagcctagtactcctttggtgcgacttagttggaactagcaggatctgaggtatat

SEQ ID NO: 50801 - DNA, 895 bp, Arabidopsis thaliana columbia
ccgggtacgagctcgagctgagcaattagaagagagacaaagtgattgggcgtattctaaacctgtggtgtttcttgacattttgtggaatcttgcttttgttgccatcggtgttgctgttctgatacttagccgtgacgagaagcctaatatgccgttgagagtttgggttgttggttatgggattcaatgttggttacatatggcttgtgtttgtgttgagtataggcggaggagacgacgacgtcacccggaggatggtggtggttctgggttgacgaattcttcgtcgcagcaatatgtttcgttagcgcaattggaggatagaggagagactaggtacagtatctctgattgatctggaattggagtttctaatttcgaattgttcactgtatatacattgaaatgtggaatctaggtttttaggttaatgttagttgatggtattgtatctgtgaatcaatgtagctttttgtgtgacctatttttcatattggtgaatattgatatcaagcttgatgtgaagcaattggtcttgttgtggagtcttaagagatagtttaggctattttggtccttgtttattgtttgtctgagtttcttttgttttcgtatgattcttgttgatccacattgttttgatggtatcagtaatcctgcgaagcatcttgaatcagccaatacgatgttctcattcatctggtggataattggattctactgggtttctgcaggaggccaaacactatctagtgactctcctcagctctattggtaggcttctttttcagagtctctttgtgaagttgtatcgttgtgggagttatataaacaacttgtactttggtgtatttgacttgcaggctgtgtatcatttttctcggtttcgatg

SEQ ID NO: 50802 - DNA, 598 bp, Arabidopsis thaliana columbia
gtatggatgtttatgtacacgatgcttaacagaatcgatattgtttccttaacgttatttaccacagcgttgcaacttccatgaggatgggtaagtctggattgacttatggaagtgctccaacgtttaggagtgctcaacgtgctgagaaacgcaaggaggtaagtacatattctatctttctgcttccacatctcagttatagatcacataagctctttaaagccaacaaaaactcataatcagaaacataatctgcattaaacgtgtagaattcactctgttctgtatactgattggaatttattttgtggggtctgcttggctcagtattaccaaaagctcgaggagaaaaaccaagcgcttgaagctgagaggaacgagcttgaacagaggcaaaaggtaaagtacacatttccggtagatgcagtttttttacctgattctagattggttgtgaaacctcatagatttaaatggtttgcaggatgaacaagaagcagccttgaagcaacttagaaagaatctcaagttcaaggctaaacccgtccccaacttctactacgaggcacctcctgcgatacctgagctctagaag

SEQ ID NO: 50803 - DNA, 1421 bp, Arabidopsis thaliana
tccgcatcgtcttcttcttcttcttctcctagtagtcgataaatcgcagtagggttttgctctctcgtccagcaaaaattcccacactggccactgtgctcgttttttcttgtctttccacagatttctttttccggccttcgattagccaatattttcttaccgtctcaagttctcaaccaaaaaaaaaaaagtcttactgattgattattttcaatgaatttaaataacattgactaatataataaactgattgattattttcaagaaatgggcttgcgatacaaaagcccaccttatccgtaatgactctatgagagcactaaagagacaatataaactgattgattattttcaagatatgggcctgtgatacaaaagcccacattatccgtaatgacttttgagaagaccgaactaaaacagtttagactttaaagacatcgtttgacgcgtacttacgtgtcattttttgtcgttatggggttgccaaaaagcagcggcactcgctcgtgcgtggccgctttaaaacccactggtctggaggaaatagtaccagctaagctcgcagctcaaagctcagtgtttaataattgtatagcttttttggtgaacgaagagtcagatcggcgagcctgagatgggttggggttcggtgttgctattactggcggtggctcttctttgtcagagggcaagttcaatcggagctaactggggcacacaggcgtcgcacccacttccaccggacatagttgtgcggatgctaagagagaatggtattcagaaagtaaagctctttgacgccgaatacgacactctcagagctttgggcaaatccggaatcgaagtcatggttggtatcccaatgagatgcttgcgactctcgcctctagcctgaaagctgctgagaaatgggttgctaaaaatgtctctactcacatctccaccgacaacgtcaacatcaggtacttcctctgtttctttcctttattagggtttcacatttgtactgtactagctggttaattggaatcagtgactgagtttggattccctaaacagttactagccatgcctgaaattacgggctactgtctttttctgagataattctacacaaatctctagagtaggtgctaaattgatgctgtgatttggttgttggacagatatgtggctgttgggaatgaacctttcttgtctacttataatgggagctatctgagtactactttccctgcgttgaggaacatccaaattgcaattataaaggctggccttcagaaccaagtgaaggtcactgtgtccttgaacgctgatgtctatgacagctccaccacttttccttctggaggggacttcagggccaatatccgtgacctcatgatcactatcgtcaagttcttgagcgaaaatgg

SEQ ID NO: 50804 - DNA, 922 bp, Arabidopsis thaliana columbia
caatttgaattcaccaattagaagagaagcagttgggtcagtctgtgaaagttcgtttcaatatgtaccgtcaacgcccagtctgttcagaacaggtgaaaagactggattccttgaacagatagttacaactactggacatgaaatcccagagccgaaatctgacaaaagtatgcagagcattatggactcgtctgctgttaatgcgacggaagctactgaacaaaatgatggcagcagacaagatgttctggagttcgaccttaacaaaactcctcagcagaaaccctccaaaaggaaaaggaagttcatgcccaaggtggtcgtggaaggcaaacctaaaagaaagccacgcaaacctgcagaacttcccaaagtggtcgtggaaggcaaacctaaaaggaagccacgcaaagctgcaactcaggaaaaagtgaaatctaaagaaaccgggagtgccaaaaagaaaaatttgaaagaatcagcaactaaaaagccagccaatgttggagatatgagcaacaaaagccctgaagtcacactcaaaagttgcagaaaagctttgaattttgacttggagaatcctggagatgcgaggcaaggtgactctgagtctgaaattgtccagaacagtagtggcgcaaactcgttttctgagatcagagatgccattggtggaactaatggtagtttcctggattcagtgtcacaaatagacaagaccaatggattgggggctatgaaccagccacttgaagtgtcaatgggaaaccagccagataaactatctacaggagcgaaactggccagagaccatcaacctgaattattgactagaaaccagcaatgccagttcccagtggcaacgcagaacaccagttcccaatggaaaaccaccaagctgtggcttcagatgaaaaac

SEQ ID NO: 50805 - DNA, 364 bp, Arabidopsis thaliana columbia
aatgtttcaacattatttgattgactgacgtagacactattttcgaatcttttatttctgctgcatttagatcttttgcatgtcttctgagttctggcggctaaaataactggacgtgatcagtgttataagtagtgtatattagtgtattaattgcgaagtaagcgttaaggaatgaagctcaatgccctaatagatataaggcccattaccaaagtctgcataaccaatctgtgatgtatgagtaggactgaacacgaactacaaaatgacatcgagaatatattagtttggttagaaaccactgacattgatatgtatatgcccgatgtctggatgttatatgcgatgtatgggtagacga

SEQ ID NO: 50806 - DNA, 614 bp, Arabidopsis thaliana columbia
attttttggtaaattaaataatattttatagttttatgggtatttcagatagttttggtattttcggtagttcaaccgaacccaaaaaagttttacttctatttcagttctccattcaaatatttgaaccgatccgaaccaagagagaacgaaaccgaaccggaatcaaaattttaaaatacccaatagattcttaaatcccctaaccaaatttactgaaatcaaaaacgaaaatgatctgaacttgaatgatactcgaacgcccagtcgtactgtacacttgtggaaaaggtgagcttgtggttggtgattggaattttattaaagttttcatttccacgttttattttcatatcttcaagaaagcttcttgggagttgttagcatgtactttgttaaagttttcatttaaaaattatatatctttcaaaagaaaaaggaaaaaggttgatcttgtagaaaataaattaaaataaaagaatactttcctatagaaaaatagcacaagttaaatacgttaagaaaacaaattagttgaaaattattaattaacttatcatcagttccactcaaatcatcgtttcacaagcattacaatctatataattagttgt

SEQ ID NO: 50807 - DNA, 477 bp, Arabidopsis thaliana columbia
gagcgtctgttagacatggttgtttctgtgagaagatcagcgatggaagagaagagatgatgactcgccggaggaaacctgtaattcagacgaagagggcgggagggaggaggagcaaaaggcgcacacctgatatccgtactcgtcaatgtctgtgattgctaaacgattgagattccttgaacagcgtttgcgtttgccattgctaaaaattgcgtttgaccattaatggtctaaattttgtgttctaatccgccggtccggtccggtccggtccagtttttaaaagtaaaaaaacgcgcatactgacaaaaccttaaccagactattgactcttatgtagaggaagacagttaaatcgttgaaacaaatctacaattgacaaccctcaaaagggagaagaaagagtgagattctagtaagttcatttacaatgtgatttagaactactatcttaaacacataagtcttcattta

SEQ ID NO: 50808 - DNA, 477 bp, Arabidopsis thaliana columbia
gaggtttgatctcaacggaaccttaaacgaagatggaggtaccgaattcgtggatccatctataaaggagttaggtcatttttttaatcaagtcaagatatctaaagtttttcaatgcgacgggttattgttgtgcgtgaccaaagaggacaacattaggctcgtggtatggaatccttatttgggtcaaatcaggtggatcgaatccggtaacactaattaccgcctattcgacaggtatgctatcggatacgacaataaccgtaaacacaaaatcttgaggtttctggaatattacaactttaacatgaagcacagatttcttgagtacgaaatctacgattttagctctaattcatggagggttcttgatatcgctccccgttgggaaatagagtcttatcaacgtggagcgtctttgaaaggaaacacttactttattgccaaggaaaaaatagaatacgaagaggatggaga

SEQ ID NO: 50809 - DNA, 372 bp, Arabidopsis thaliana columbia
gagaagtcaaagatgacgttttaaaaataaaaccttgagaaataagcgaacgtctttctctctctctatatatatatatatagtttatttgaagagttatcgaaaatgtaaaattaactttattatagattttcggtattagtgataaaggtaaatatctataatcattatcaataagtttgaaaatttacattttggtctaaaatatttagaatatgaatactttcaactagacagacataatagacataataataagatataaataatgaacattatgttttatatgtcgatcggagattgaaccgagtacaacatcgtggcgattacgataataatcagattgaaccggttacaacatggtggcattta

SEQ ID NO: 50810 - DNA, 475 bp, Arabidopsis thaliana columbia
tttcgtagttttgtttttctctggaccatcaataacatgactcatagacttttcaatccctgtgattttctgatgtatatcagagattataaccttagacgaatccggattgttcaaatccagcatatcctttgtcttcttgatatctgatgcaattttcttaacctttccttcaagaaaagcaagcttctcgtgcagcttgcttggatacttagcagtactattgctgcttccttcatttcctcttatatcctttgacatctccattgccttcccaacattatccaaagacttccttcttaaagctacactagtccctttcccagtcttttcaatcttactatcagatttcaaagcaacagtagatttctctccagaaccaactaaagcatgtgcctttggatcagaaattgaatttctcgccacactagaaccttcaaatttgcttgaattcactggacaactacttccttca

SEQ ID NO: 50811 - DNA, 552 bp, Arabidopsis thaliana columbia
tctagaggatcccccaaccacaacgagtaaatccaatgtatttcgtgcgccaggttttgaattaaaatttcaaatttggtaccaaagcaagcaagataccaaaaaacccccttccacaagatctttgttacaagttgttgttgtaaaatgattttccctcttcttttttcagtttgtggttgttttattttttggcgggtggttctatagtaataaaacaccgcgctcgagggtaaaaaagtaattaagaaagagaaatctagggtttattagtccccgcctcctcctttattataaaaaccctctccgtttgttttatccgttattcttctgcggcgtctctctctcttccttatcatcatcatcttcactctaaacttcacagagagccattcaagcagaagaagagctctttgatccttctctgccatttccgttactctcctttcttctgtttcagagttttctattcttctcaatcctatctcgcttcgaagtggatcaatgtgagttccatgatcgtttttgatcctctcttacttgtagttgatg

SEQ ID NO: 50812 - DNA, 571 bp, Arabidopsis thaliana columbia
tgaatagatcaagagaacaatgggttagtatgtgaaggcaaagaagaagaggcataatcatccaaaagactcaaagactctcaagtcacgtgacttgtatacatgatcaaacgcaaaacgcaaaactggtctatgatgactcaaagctcctaactctaggtgttcgatacaactaactccccaaatccaaataacctcgaaactggtttgaaggttttctgagtctcataatttaacctaacaagttgacaaaagagaagtatcagctatcaccacctgcatgatttggcttggtgtctggtggattgtgttttgcagcttttgttgtgtcaaggatcacgacccgcccgtcaaccaactgtgatccatataacaagacttcatgaagactaagtaacataaccagttccaagagttgacgattttagattatctcaagacaatagttccattatctaacatatcttgttctaatgctccaccaggggattcacaagtaaattatcaaatctttttcttcataacaggagaaagctataagtttgaaagatcaatactgtgaaagggttta

SEQ ID NO: 50813 - DNA, 604 bp, Arabidopsis thaliana columbia
tgttttctttgcagtttgtaaataaattacgatatgctaaagaaggtgcgagggatataatggatcgagcatgtgccgatttaccatggcaagtttggcttgaagttgatggaaaagacattgaaattcctaaggtatcttactgaaatgacattagtccttcattccccatcttgtgtggtgtgttcttacaggatttgtccgtatcactttcctcatactgtgcctttttgttctttgctaatatggaaaccccaaccaatactcactaaacatatattaagtaaaaattgagcatgaaagatagcgcataattgcttgataaaaagtaaaaaccatagctgacaacgacattttagtttcctatctggagaacgttttgattatgtgggaccgagcgagagaggttgacattaccaaaaaggctaaaattattgttgttacctctggaaactgatgtcctaatttgttatctctcaggattcagagggtctaatagtacttaacattggaagctatatgggtggagtagatctttggcaaaatgattatgaacacgatgataatttagcattcagtgtatgccgacaagactctagaggtg

SEQ ID NO: 50814 - DNA, 338 bp, Arabidopsis thaliana columbia
gtagccacctggttgttgttgatatagctcattaaaatcaaattctcattttcatcaggggaacgaagactagaagctggtgcaatggtcctcgctgataaaggtatcgtgtgcattgacgagtttgataagatgaatgatcaggaccgagttgctatacacgaagtgatggagcaacagactgtaacaattgcaaaagccggtatccatgcatcactgaatgctagatgcagtgtggttgcagctgcaaatcccatatacggaactgtaagttctcaccgaagttttcctaatctacttactctactgactagtatgtttttgtcctaatacctact

SEQ ID NO: 50815 - DNA, 786 bp, Arabidopsis thaliana
aaatgcattgtaaactttaatcatacggcatgaaattgacaaaacaacaaaagaaaacggcatgggatttgcaatgtctaaataagaaaatacaattataaacgtattttcctaaatccataaatttgttacctaacttcaaattttaattttggctaataatacaagaagtccatagtcttcttcgcttggagtcttggaccaacaaaaaatggctccgtacgatccttttggcccacgggcttggagtatgtaaatgaaatttgttgacaagaggttatttattttttacaagtttatgaaagcaaaaaaaagaagactaacggtccaacataatgattcatcctgctgcctagctttagtaacccccaagattctgaagcttttgacttgtccatggcgatatggggcaaagataaatcttgatgtgttgatgggagcaatgacaaattgccttctgaaaatgttgacaaaactatggagaatgagactggtgggaaggatagggaggtagttgaagcagtgacaaacagtgaacctggaaatggtgatggatttgcaaaaaaaggcgactcttatgatgacaaattaccttctgaaaatgttgacaaacatatggagaatgaggctaatgagaaggagaaggaggaagatggtgctgctgatgagctgtgcgctttacaggatgcgcttgagacgacactgtttcagcatttaagcaactatgcacagaagcagatgttacagaagttgaggagccttagagccaaggaaaggaaagagttg

SEQ ID NO: 50816 - DNA, 706 bp, Arabidopsis thaliana
tagagtttacttttaattgctacgtggaattatatatacatatatatgctaattgttcattagaaaaaacaaatatatgggaatgggacaccaaatacaccacttgttctctgaggactaaaacatttcatttcttactggtggtttgaattattcctccaaagtttccaaataatatatttaatatatatgttcgaacatgtgaacataagttttttttttggtgttaacatgtgaacataagttgtatataattattatttgatattagtatatagcgaaatataatttccttacgtgggctggggaaatatcttgggacaatgttcaaggtaaaacggcacaatttctttagccgcgaaacgaggtctaccgttctcgtccggtgcagtcaacatcgccgtcacaagaccaccggtgctagttccggctatcacgtcgaaataatcagctaccctcacgtgttctccatctagttcctttatataccgacaaaattttattttttcgaagagtaaatacaaaattttgatgaatcatagttaccatatggtaagaacctaatatgaattagtgatcataaatcgatgcagggacttaactactacaaaattcgcatggcgagttatgatcctatcatatgtatctactatcttagtaacttgcattctactgaaatttatatagatataaacctgaagttgtt

SEQ ID NO: 50817 - DNA, 814 bp, Arabidopsis thaliana
caaaatctcgatttataatcttaactcaaaagaagatcgatcaactattatggagaacaaatcgccctccaagaaaaacaaaccgccatcgtgcggatcactcgtaaccatcctcagccttgatggtggtggagtcagaggaatcatcgccggagtaatccttgcctttctcgaaaaacaacttcaggtttaatagtagaatgcaaattactagatagtagataagaagggatatatcatatataactcgccatgcgaattttatacttagtagttattaagtccctgcatcgatttatgatcacgaattcatatttgatctttactatagagtaattaaacaacatctttcttcttgtagttattttcttgaaaaattaaactttctcggtatacataggaactcgatggagaagaggcgaggcttgcggattacttcgacgtgatagctggaactagcaccggtggtcttgtgacggcgatgttgactgtaccggacgagaccggtcgacctcatttcgcggctaaagacattgtgccgttttaccttgaacattgtcccaagatatttccccagcccacgtaaagaaattctatttctctatatacacactaattacaaaaacaataataattagacacttgtatttctgtttagaatagaaaaactttatgttcacaatttcgaaaatagtaaacgttatttaaatttttatacggaataaatcaaccagtattttggtgtctcatataattgtttgtttattcctaatgtacaattggcatatatcttatacgaattccaacgtgacaa

SEQ ID NO: 50818 - DNA, 2689 bp, Arabidopsis thaliana
cacataaattatgattttgctgttgcatagattgtgatagttacggatggagaagaacagagaaaattcgaggaggagatcggagcagatgctttaccggaagagtacggtggccgagctaagctcacagcaatccaagatgttcttcttcctcaggctgctccagtaactctaacaaacaataatgtttagctctttatttttggaagcattaacctgaatatttgtaatggtcagaacataactagtggtacatctctaaatttccaaaagaagcaatgaaaacatgagaaagtaatgcgaatatattcaatctggtgactgagtgctcgctcttgcttatcttttcttattcacatcataagtaagctgtaaagcaggattgatcaacagaccagactaacttctagaaacttaatgtcctcttgttgtacgtgtaagattccaaagttagctatagatgtctttgagctaaaaaccagaatcacgagctcttaaatatgatccctaagccttgttatatgacaaaagacttttcaacaacttaatatttccaaaagaagaaatgatgaaacacatgagaaagttgtgtgaatatactcaatctggtgaatgagcagtttcaaacatcatgctgtttctgtatcttaaattaaacaatcttgctgttttgaattttgaagatgttggtcaattcactaacacactttaaagtcccaagcttttttctatcagccgcctccaaaatctctctatctctctgtctctcacttcttcttcctcacggcggcgacaatggcgacgttcactcatcaaaccccacaaacccatttcctctctcgccttcctctcagagctaaacctagacacttctccgcaagagtcaaaatgtctctccaagaatctgcgccttcactcgccgtcgttggcgttaccggagccgtcggacaagaattcctctccgtcttatccgatcgagacttcccttatagctccatcaagatgcttgcatcgaaacgctccgcagggaagcgtgttgccttcgatggccatgaatacacggtggaggagctcacggcggatagcttcaacggtgtagacatagctttgttcagtgctggtggatccataagcaaagagtttggtcctctggcggcggagaaaggaaccattgttgttgataatagctcggcttttagaatggttgatggagttccgcttgtgattcctgaagtgaatccagaagcaatgaaagggatcaaagttggaatgggcaaaggggctttgattgcaaaccctaattgctccaccattatctgtttgatggctgttacgcctcttcatcatcacgcaaaggttcgatttttattctgaaatctgcttagtccaaaattttgaagggtagttagagaatcaatggaagctttagactttagtgctctgaataatgtttgattggctataataggtgaagagaatggtggttagtacatatcaagcagctagtggtgctggtgctgcagctatggaagagcttgttcagcagactcgtgaggttttgtttctatttcagccttctttgattgaattgtttaatgattgtgctgagttgtgattctgcttcttcgtcttctttgcattggtgtgttttcttaggttttagagggtaaacctccgacttgtaacatcttcgggcagcaggtgagtgcttaatttgcttatagtttgtatttcgaatgtgctgattatgaaatccctttttgagtaatgtgatggttttgtatgttgttctgcagtatgcatttaacttgttttcacataatgctcctattcttgacaacggttacaacgaagaggaaatgaaacttgtgaaggagacaaggaagatctgggtgagtggttacttaagtgctattttgtgttcatttcactttgatcttttgttcaaaaattttagatatctcacaccaatttcttgcccttcacagaatgacacagaagtaaaagtaacagcaacgtgtatacgtgttccagttatgcgtgctcatgcagagagtgtgaatcttcagtttgagaatcctcttgatgaggtaataacacacgtcgaacccgatttctactgattctgtgttgttgtgttaccttatgatttcactcactgatatgacaatttgaatcataatttgaagttttaaaccacattctatggttttaatttaactcaagccattgaaaaatgtggagcagcatgtaatcagcataagtaggcttggatagttcttgatgcacttgcagagttaaaccctgaagttgttctttggacttgctctggtagcatgtattgtgattcttgttgcgcaattaaaagaatcttatgatcaagttcttattcaggttataacggtttttcttactgtatcataacagaacacagcaagggagatactgaagaaagcacctggagtttatataatagatgaccgtgcttcaaatactttccctactccactcgatgtctctaacaaagacgatgtagcggttggtaggataaggcgagacgtgtctcaagatggcaatttcgggtaaagtctcactcttttctactgaatttgaagcaaatgtctttgcgatatgcctaaaaggatataactttgtgaattcaggctggacatattcgtttgtggagacc

SEQ ID NO: 50819 - DNA, 797 bp, Arabidopsis thaliana
tcaaaatttctgtataaaacctttgctcatgaatgaatgtattgtatgcaatggtgtgatgtgtttcagacttttcagtaaacaagcctatagcagacactatttcttttacgcagttgatcgaacacttggtgtgcgtcttggtgaaatatagaaagattacagatttgtctgttgtttactagagaggttagtcaaccatggcggagtttggagagcttgaagctcaagatggagtaagaatgccatggaacatcatccccgtcgcaacgaaaaaggaacaatcaatcgattccgaagttccagtttccgccatttacacacctctgaaacctcttagatctcaatcccttctccttccttactctcctctccgttgccggacttgtcgctccgttctaaacccttactccgtcgtagatttctccgcttgtaattggggttgtcctttctgcttcaatcggaatcctttcccgctaaattactcttcagtcgccgataacaatctcccgccggagctttttcctcattccacaactgttgagtatctctgtgattccttctcttctccttctcctcctgttttcctcttcgttgttgatacttgtttgatctctgaagaactcgatttcctcaaatcatctctcttccaagctcttgatcttcttcctgatacctccatccttggtctcattacgtttgattcgttagttcgtgtttacgagcttggattccacactgtccaaatcttacttcttccatggaaacaaagactgtactaaagatcagcttttgga

SEQ ID NO: 50820 - DNA, 1044 bp, Arabidopsis thaliana columbia
atgctgactgtgccgatccgttcatcacgctcacggtttgctccttcccccaatggcccgaataaaagaaaatttattattacattttgtttttcgtcttctctgttctttgttgacccacccaacaaccaaaaaaaataaatacaaatctgtatctgcgtctttgatcctaaatagctatagacagacacacccaaaccctagatctaaccccagccgtcagatcagattgatcgggcaatcgcttctagaccgttggaatcaagcaatggtagaggtagaatcgtatttgtgggtatctagaagaggcgttaggattgtctccaagctgggtgttttttcatcttgatggccaactaatcgaatctcctactctaaagatatttttgtttatttctgtcatgtgtgatttggtcgcgcgtacgggtcgtctccagcagcggtacgaggatggctctcgtctcgtcgccgggtaccgtttttttatccatccttgttcctttttctttttattatgtctgcgtttgtatcgcctctttgaagctgacgttttggtttatgtaatgtgaatctttctcctttattcgaaaattgtggatgcgattgattataatgggtgtaactgttgggaatttgttttcatggatctctacgtatccctgtattgaagtgattgctttgatttattttgttatctgcttcgtgattaattgggcatttttttgtgttgaggtgttatgtctgtaattgcaaaacaagagtcacgtcaccttatcgaatcatgtttgaagatttttttgttttagagtcatgttttgaaaagaggattttgacatgtttagacttgttttgattgtatctgatcttggttgatgaccatgtctctgttaattttgttttttggagatgatggaccttgcttaacaagttcaatgtcgggcatttataggtgtattccgtttaggtatgtaaattctgacaaagatggtaattctgaatctgggaaagtgattcaagtgttgatgatcagctcgtctagtgggg

SEQ ID NO: 50821 - DNA, 920 bp, Arabidopsis thaliana columbia
tagtgtttccttccaaggaatatggcttatgtcaatggcttgcatgctttggacgccaagtttagttcccaaggattgtttccttcacattgaagagggtaaacacaccattagatgctcagacgtcaaagctcttcatagagcaatatcattggttaatatccaattcagctggtttcttgtgatcataaccatctttgcaatgtggttttacatatttttgcaaaggatctacggtgagaaaattgaatactctcagcttcgaacaaaggattaatccaaaaacatggagatcatgatcaccatgactgaagttcatgatgctgagtcacaaaatggagtcgagccactagtttgaaaatcattcccactaaaaactaccaattttcttataatgttttcttatttccaattcagagaagcttgatcatttgtatatattataaaaacatattgtgtaattattgtaaacgaccactaaattttagatgagaccgtggcaattacgtctacaattttcttaggtctaaaaaaaagagtcaaactaatctcaaaaacgattctctacaaaatcaatcaatctcagaagtcttctctctctctctgtatcctcaaacaaagtatggccctttatcctttcttcatctcaatcttcatcttctctttgaccctcttcactacgacgacccattccctcaacgaacccgacccggattcgatttcgaccgtttacgaactcctcccaaagtacggtctcccaagcggtctcttaccggacaccgtcaccgatttcaccctctccgacgatggccgattcgtcgttcccttgcccaattcctgtgagattgaatttgactacctcgttcactacgataagaccatatctggtcgtatcggttacggttcaatcaccgagctca

SEQ ID NO: 50822 - DNA, 372 bp, Arabidopsis thaliana columbia
ggaggatttacggatatagacatctgttgtcaatcgggtaattatgtttttactattaaaaaaaaagttaccctattagccgcgtacagaaattctacaacgtgtgggtcccgatggcgacgtgtcacaattagcttttgcttaatcctaattggataattttaacaaacaggtcacaacagtggcatagtcgtacatcctgtaaatttggtcccaccctgtgttaactcgctcggcataagtgtccgtcactcccaccactgtagtgagtgaccaaaggaagaagacgaagaagaagtcgcatctgtagagagcgatgtagcgatatatgtcaagacgctacacagatcgtgggaatcaagagcaacagaa

SEQ ID NO: 50823 - DNA, 565 bp, Arabidopsis thaliana columbia
  unsure (1)..(565): unsure at all n locations
nnnnnnnnnnnnnnnnnnnnctaaagagaggctgaagatgttagttacgaccgggtaaccgaaaaaaaaccggcacgccccgaacgttgccatgaaagtttcgtgctaattcggcttccgtaccggttaacccgattcatctaacaaatgaatgaatcggcaatttgcattccgtcgacttatgatttgcgacggcagaaagataacttgtcatacaactttaaaaggtgagagccatcacaaatgtgggaatatttgtagggacattacctgacgacagcaaggccagtactggcgcggcctgcagcgagatttaccactttgagagtaatttttttaactacgtttattgatctaactcacgaaaatatcttcggactctggaaattggtgtgataactttgtcagcatcgcaccataagcaagctagctcactcgttgagaggaagacgaaaatgactccgtttatgactgaagatttcctgttagataccgaatttgcccgccgtctgtacacgactacgcaaaagaccagccgattttcgattaccattgccatttgccg

SEQ ID NO: 50824 - DNA, 108 bp, Arabidopsis thaliana columbia
cgtggtaatcacaaacttgctgttgggccggggcaacggggtagggaaaggtgtaaagattaaagccatcccagtctgggcttgagcagctctgtgccagccataaag

SEQ ID NO: 50825 - DNA, 531 bp, Arabidopsis thaliana columbia
tcgcatagataatgcacttgctcttggcatatacatccaagatcccagtcttaacaactaaatcattgctaaaacccattcttgtgcaatacccatgaacagctttcccttccctcaatgcaccagcccttcctagtgcaggaaacatcccaacgatggtggatagattaggactcagaccatcgattctacgcatatccacaaacaatccaatgacatcagttaaacagcaatgtaaagaagacccagaaatcatagcattccaagcaaccatgtctctcataggcatttcgtcgaacacctttatggccatctgaagttccccacacttagcatagaaatcaaccagagcagtacatacatacatatcagttgcaaagtcgctacaattcgcatgactatgtatcagcttaccatcgtcaattgctcgcagaccagcacatgctttcaaaacaaacgggtacgtatatttcgtgggtctaacagcagaattcagcatcttgtagtacaaatctaaagctttttccgcga

SEQ ID NO: 50826 - DNA, 547 bp, Arabidopsis thaliana columbia
cagctaacagtatgatattgttcactcccacaccataaccgcttccaatcgggtaccaagctgcagctgcaaataaaccacaaacaaaataccaattcacatcagctgttagtttcattcaatgatgattttctctcctagagataaacttttttttttggttatgtttcttacaatatatttgtctatggttagtacttcgttgattctttaaccgcagattaaccgctccccaagtgtttgtagcaactgcatttgccttatggccttgagcaaataggaagattggaagtgcatgtggtcttcctcctccatcccctttcgggttaaatcctagtctcctaattatacattaaccaaaaatgttagtagactacgtaattcacatagcagttgcaaattttgagattaatttggttattagaattactagccagtacaggtcttcaacgagaaaatcatcggagtaatagaatttatcttccaaggtagagatacgaagtatcttccaagtgaagacattgtctggagggtttgatatgaatgt

SEQ ID NO: 50827 - DNA, 567 bp, Arabidopsis thaliana columbia
tataccaatgacctctcttcaacgaactgtggacaaaaaacaaaaacaaagttaaaaatagagattctactaatatgcatgataaggcggagaatgttaactacctgagaataacaggcaatagcggttttgaagtcttgctctacgaaggctcgatcaccgtttcttcgaacatcttgaagttctttcacctcttgtatccattcttcgaaagataacttagctcatgaaaagattaaagtaaagtaagatctttgatcccaaactagttgtacaagtttaacttgatgatagtttggttacctcgatgatatccttgtcatcatcatatcctgccaagaccaagattgaatgaatcgatgcgaggtccattctcaaacaagcctctcctagtggcgaaagattacttgacgatgatgcatccttctcttggtttgtcatttcaacaacttcatatgatggagcctacaagcaagaagatcgacgtccaacataaatgcgagataaaagatcaagaattcaattatggatgcaatgagctcattacttctgttctagtttgcaagg

SEQ ID NO: 50828 - DNA, 545 bp, Arabidopsis thaliana columbia
cgtcgtcctataagaagcataaaacgcaccaatcccttcctcacgcaaaaccctcttaacacaatcccagactcctttataagtcccttcacccatctgcaacctctgcttcaccatatccatgggagtgaaaacagcatcgcttgatatagtagcgaatacgccggacatcgcatgcgcgacggaattgttctgatccccggcggataaatacttcttcgatacttcatagaatgagaagtaaacggcgtgacgaggtccagcgccgagacccatagcccagatcccgcgatacagagctgaaggtccttccttttggataatcgaacggaaagcttcccggattccgacgggttttaagggacatggtcgaagcgcttgcatatgggtcttgatggtatcgacgggaaacatcgccatgtgttcgacggagccagcaatcgaaccagcaatcataaattgccagaacttaagaccatcgtgagcgatttccggttttaaatccggtgtttgagaaacctgccggagatcaggttcctggaatt

SEQ ID NO: 50829 - DNA, 904 bp, Arabidopsis thaliana columbia
taaattaaattaaacttaaataaatgccttttgtactttgaaaggttgtgtcttttaatcgcaattttccgtaaaaaaatattgacggttgtttttctcgcttgtgtcatttattgcaactttcctatattgtaattttctgtcaaaatatttacggttatttttttccggttagttatatatatactcttaaataactacaaaaatttataatatgcatcattttgagttagatctgcgtgagggcgggtattatataaataaatttataatatttttctctgcgatatcaagaaaggtttgagttctagtttaattaaaataattcttattaaattaagttaaaataaattaaattcaaataacataaactaattatagtcaaattaaatttgataaaactaaaataaataaatctattaatttatttttctcatggtgtatgatatatatgatttacattttgattttaaaatataaattagtaccaaaaataattaattttaaaaaaaaatatagcgactgtttatagcgacagtcaaacgaacaacacaacgacaattattagcgattgttgatgtaattggtcgctgagtccagcgacagacaatcgaacaatatatgttgtcgctggttgctgtcgctggtcgttggtcgctgtcgctggatccagcgacaggaaaacgaacagggcataggttttgtttgtgatatttagtatttctaacgtaaattttaaaaaagcgccaaaatctagaagaagagtaatatgcgagaaaatcacttttactcttatttatttacttgtcttgccaaatatccatcaaaattattagttacttaattatatgatgtttgactaattatttactttattggacccgggatatgtaactaaatgggc

SEQ ID NO: 50830 - DNA, 608 bp, Arabidopsis thaliana columbia
tctacttgtggacttgtctcatcatatgattgtccattccctgtattggcagcttcaaccatgtttgtggtttcctctacttgtggacttgtctcatcatatgattgtccattccctgtattggcagcttcagccatgtcttgatggaagtgagattcctgagccacctctatttccgaaaagccatgatccacataagcatccaacaggttctgttcactgtagttaaggtacagatcatggactgcatcttcgacagacttggtccatttctctgcatcttcaccatacgacttattgaacgtaaacttaatgagctgcattttgaaccgaggatccatgaccactgcaactgccaacacaaggaagcatcctctccagtactggtcgaatttttccctcaatgattttgctaggtttctgacatccgggtcttccccggggcagcgtggctcagatctagctgaagctttgtcatctcatggtacaaatcgtttgctgtcaacaggtttggcccagtcaatgcattaccgcttcgacaagtacttcaagcatgagcaaagactctcaatctttttccattcctcaggagataatgatattttgta

SEQ ID NO: 50831 - DNA, 1347 bp, Arabidopsis thaliana columbia
aaagcaaaacacaaatggcacgacacaaatttagtgacattgagtgacacgtgttcgtcagctccatagcctctttattttgttttcctttttttctcccaacatttgtcagaaagagaagacgagatcaaatgagcaatcgctgttgtaacaaaaaaaacaaaaaaaaacaagaggctacacgtcttgtttcctcaacaacataattttctctccaagcaactacaaaaggggtattctccaaattaaatttagtgaccgagttttttcttaaaatccaaacattattgaacatacaatctttttttttttttggcaaaggaacatacaatcttatacacatattttatgaccaatatcaggaagaccggtccagagcagtctgctgtttgattagtattattaattgcattgagttgatttcaaaacaaaattacatgtgttctggaatgatatatgagtgcttcacaaattggagataaggttttcaaagataaaatgtaggaaattgtcgatcaagttgttacgttatggatttattatatatgatatagttcttttttatcatgttgatatttacgttaaaacttgactgatcacatattcttgattttagttagacaattttgcacatcataagtgaaaaaaaaaaaaacttaggtcctcttcgtttccctgttgctggatccagcgaccagcgaccagcgacagtaaccagcgacaacatacattgttcgtttgtctgtcgctggactcagcgaccaattacagcgacaatcgctaataattgtcgctgtgttgttcgtttgactgtcgctataaacagtcgctatattgtttttaaaaattaattattttggtgctaatttatattttaaaatcaaaatgtaaatcatatatatcctacaccatgagaaaaataaattaatatatttatttattttagttttatcaaatttaatttgactataattaatttatgttatttgaatttaatttattttaacttaatttaataagaattaaaactcaaacccttcgtgatatcgcagataaaaatattataaatttgtttatataataatttctttaaaacaaatctaactccaaatgatgcatatatgatatttatttaagtttaatttaatttaattctgtttaatttaattatttgtatttatactttaattacaatataaagatcgcttagttgttcgtgtgcatgtcgctggatccagcgatcaaaagtatcgactaatcgctaaaaccagcgactgatcgctaataatttctgcgtccatgaattgcggtcgctgatcgctgggatttatcgctaattattggtcg

SEQ ID NO: 50832 - DNA, 442 bp, Arabidopsis thaliana columbia
cttcctcaagtgacttccaagcagattcagtcaatgaatatttcatctctcaggtgactactacactgctatttcgtttgatgttggtgacgagccaacattatgaaaatttctttatctatcatttttagtaatttggtcttaattgtcccctattattgctgatattttctcctttatccaggccataatggaaggaacgagagccaactacatactgatgcaagctccgttcttgattccgtttacaagcagagtcaaaatattcacagtgagtggctattgggatatgtatatctgatgaataataatcatttgtacgttttgaggaacctataagagctaattaaatagacttgcataagtaatctgggtaaatgtgagaaaaagattgtatgtacctgtttactgataacttggttgtggttgtattgacttgctg

SEQ ID NO: 50833 - DNA, 573 bp, Arabidopsis thaliana
gcttcctctttcgattccctcataaaccatattaagaactagcttatagataaggatatggcctttacgaacgtttgcctatggacgctactcgccttcatgctgacttggacagtgttctacgtcacaaacagggggaagaaggcgacgcagttggcggatgcggtggttgaagagcgagaagacggtgctactgacgttatcatcgttggggctggagtaggcggctcggctctcgcatatgctcttgctaaggtatgtaaagtggcgtcacagtttcacagatttgcgtcttagtattaaattgattcttgttgtttttgtataatatttgtgcatgagtactgataaaggtttgaactatatacactatatatgattgttgttgtttttttgcattatacacttcggctgcaatatttttgggttggaacgaatatattcgtatgctaatttccgattataaataggacgggcgtcgagtccatgtaatagagagggacctgagagaaccagagagaatcatgggtgagtttatgcaaccaggaggacgactcatgctctctaagcttg

SEQ ID NO: 50834 - DNA, 527 bp, Arabidopsis thaliana columbia
catacagagcaaagccaatgcccaatctttctcaccgagtccacccgacttgcaaacgggtcacactccgtcgaagacaccgtcttcgccgttctcgtaaccctcttcttcctcaccggattactctccgtctatattcgccattgcgctcgctctaatcctgattcctccaccagatacttccgcaaccgacctaacgacggcagttcacggcgaggcggtcttgacaacgccgtcgtcgtaagcttccctgttttcgcttactcctctgttaaagaatccaaaatcggatccaaggatttagaatgtgcgatttgtctcaacgaattagaagatcatgaaacagtgcgattgcttccgatttgtaaccatttgttccatatcgattgtatcgatacttggctttactcgcacgcaacttgccctgtttgcagatctaatctcgccgcgaaatcgaataaacccggcgatgaagacgacggtgttccgtagcagcgatgagagacacgtcgctgttgatattgaga

SEQ ID NO: 50835 - DNA, 622 bp, Arabidopsis thaliana
aactccctcagatacgagttatgtggacaacagaaaagataactttattgtggtgatgccacgtccaaactgatataactttgcattttataggcatgttttactccttttatagtaatctaaaccatattgagaactagctaatagatatggatatggcctttacgcacgtttgtctatggacgctactcgccttcgtgctgacctggacggtgttctacgttaccaacaggaagaagaaggcgccggaattggcagatgcggcacgagaggagagaagagacagtgctgctgatgttatcatcgtcggggctggagtaggtggctcggctctcgcatattctcttgctaaggtttgtaaagtggcgtcatacttttgcaaaaatgataggaataagtttagtactatatatgattgtttttattgtttcatagtagaattctattgcaatattttggttttgcataatgtataaccttatgcctaatttccgattatatataggacgggcgccgagtacttgcgatagagagggatatgagagaaccagagagaatgatgggtgagtttatgcagccaggaggacgactcatgctttctaagcttggccttgaaggttgg

SEQ ID NO: 50836 - DNA, 909 bp, Arabidopsis thaliana
tatagagatctactaatcttacatcatgagaaacaacttgaactgaaaggtagtctttccagaaaacagccaaacccccacttaaacccctaagagaaactatacacatgttttgaaaacccaagctgactcccaaatctctgatgtagttgtcctgttgcttgggtttaataaggaacatcaagtccaagagatacacacgttgcatctcctctagacgtcgaactgtcaagggttgtcccattccctgacagttccaaaatccaactctcatgggactggtggtggtacggccccaccgcggctccgtcaatttggttgttgtgagagctttctcctgaaccactgccttcctccatgttgttgaacatactctggaaaccaaatcctatctttttcttacgggggctgaagctctcgtcatcttcatagatctgtttcctcttgcgaactccctgtcaagtaactccttcgcacttggaggggcccctgaatcagtaacaaaagaaggaaaagtgttaatagtattgataccctcacttgcccattcaccagatgaaatgccttcaagtgcattgtgatgaggatcaatgtcggaaagctggcccctcatcccttgttcagcaatgttttggttcccttgaggattatcattcccctcagcaacatcatcaatgacaggtgggccattctcgccaagttcttcaatctgcccacctggattgccctgaaccatctggttcccttcatcattatcgtcattgtcgccatcagagttctccaagccaccatcatgtagtaagcagcgaccagaatcatgcgtcaatcatcccacagacagcacagaaaccacgaagacgttcatagaagaaacttaggatagtgttgactcctggtgagaattgataa

SEQ ID NO: 50837 - DNA, 1534 bp, Arabidopsis thaliana
tgagaaataacttgaattgaaagatgctttttccaatacacaactaaaccaccacttaaacctctaggtgaaataatacacatgtcttcaaaccccatcttaacgcccaaatcccttgtgtagttgtcttgttgttttgtttcaatcaggaacaacatgtccaaaaagtacactctttgtacttcctctagacgtcgaactgtcaaaggttgtcccaatccttgacagttccaaaatccaactctcatgggacttgtggtggtaccggccccaccgcggctctgccctggttctgtttgttgatgttgtcttcggatcccactgaattctctgagtcatgaccttcagaatcctcttgagaagttatcttcatgcggcgagaggaaccagaagcttcacccacttcaaagttatgtttcctttttcgcagctcttgtgataggagttccacaggtcccagaatatcacctgtcgcattagcaaaagaaggaactgggttataaagaagatcctcatcacatgtccattctccatggaacatgttacggtcattgtcggaggagatgtcctctaatgcattatgggtcgggtcaatgtcggagactcctcttttgcttcattgacatcagcaccaacgggacctggaacaatttcttcacccacttcatcaccatcttgaattggttgaccatcatcaccaatctcctgaatgtgtactccaggatttccatgaaactcttggtcaccatcggcattgtcatcatcgccatcagaatcatggagagctccattttggaggacacaacttccagcatcatgagtcattcgtccacaaacatcacagaagccacgaagacgttcataatagaagcttagcactgtgttcacgccaagggagaactggtagttgcgttgaaatcgcagggggtgattcacatcccatttgatttggatccgaacaaattcgactctggtggttgtaaaaggatcgaagtcgaccgcttttcgctcaccaagggaccctgctatgttatcaatgacttcgagattcagaaactgtaggggaatttctcgcacttggatccagaaaggtatgaaattgagcacaagaggatccatatccggtgtccagcgttccaccaccagcatacgatccgcaaaagaccatggaccgcgtctcagaacagtgtcaagagattcttcagatggaaagataaattggaatcgtcgattttgaatgattctgccacggacgaaaccaaccaaaccccaagttcgtggaaccgtagtgaggatctgacggagattctgatttcgcggcatgaggggtctacccaggaggcaaaagcggttatcatccaccgccctttgaacaatagcctgagggagagcaacgggagtttcgtcgataccgagattgatgttctgaagggcacgacgaacattatcagccatgattagtcggagaggatagaatcgaaagagataattgattggaggggttaaatgtgagggaatggagaagaaatctgca

SEQ ID NO: 50838 - DNA, 523 bp, Arabidopsis thaliana columbia
agaatgattcgatgaaattctaaagtcgatagtatcatatggatgaatgaagatgtcagtatcattgtacatatatacgtaataaaccatgatatttatttagtgttaattctatgatacatgcaatgttacagttgtgaatcaggctagaggagatacatgtatagatggattaggctatgagcaacaattgagacgagagatgcaaggccaagcacggaccatcgagcgaaagcagctgtgatcgtagtgttggggtgccgctgtgcaaatgctactacgaatgtgaatctccgccatcaccacccgcgccgccgaagaaatgcgacggtggggctggtatatgtagtcaaagatgtcaaggacaatgttgtgatatgaactgtgcacaaaagtatattggtggacatggattttgtaatactcttggtacgtttagtttctgccaatgcgaatatcctttgttaaagtcggttgacaaaactgtacgccagttattttgtattattattttaatttcagc

SEQ ID NO: 50839 - DNA, 531 bp, Arabidopsis thaliana columbia
tgtaagtagtgaacataggtctcatcttattatcctttgtagctctgttcaatatcaactcagcttttccaacttctcctgctttgatgtatagcttcacaagcgcgtgccatgtcgacggcccaatcgcaatccctgcatttcccattcttttaaccagatctctgccttttgctagcatcttgttctctgtgtatatctccatgagggcaaaatatggcatcatagggaaaattttgtatttctccacaagtctctcaaacactgcctctgcttcttcgacttccttcagctttccccatgctttaatggcagaaatgcaattatcgtatctcggattttgatcaacaaacctactcagtcttctcacattgtcactgtctcctatgtctgcataaagtgggagtaatgaccggcacacccatggagtttgttgcaaacctttcccttctatctccttcataaggtcttgtgctctttctttaagcccgctcttatgtagtacttagccagaatagactgcagttcagg

SEQ ID NO: 50840 - DNA, 333 bp, Arabidopsis thaliana columbia
  unsure (1)..(333): unsure at all n locations
atccccgttaatccgactttaagttattggtttccaagctatatggttcaaaattatggaaggttacagttttcagtttgagtcaactcttaacaatttaggagagaatttgaaggccctgttctttttccagacgctgcgatcaaatccagcgaccaaaaaaacagttgtttaacacacaattacgttgaagtctatagaaagttatgtggagaggaatcactcgattctaaaaacagcgacctataaggcatatacacgtgttgccanaaataacagcgactcaacatcttcactagagacgtcgccggcgtccatattgagcgactgttt

SEQ ID NO: 50841 - DNA, 532 bp, Arabidopsis thaliana columbia
gatcacggcagtcagattccgacgatgaattatttgtttctgttggttgagtttgaggtaaatgtataatgttcaattggcgctgtacttctttttgtagactgtattatagaaagaaatatctaagagtacctcatttccaatttcattaacatgaactctttgttaaataagtgaaagagcaaggaaacagagatatatatatacaacaactgtttaaaagagaaacagcgggacatgctacacaagcctacaacactagtcttattcgatattccacattttggtatcaggtatagaaatatggtcgttctatttcacgtcttttcacttgctcttggttgtccgaattcggcagctcttggtcttgacaagagatcctgaagagcctgcaagcttcaatctttcttttatcagaaacccaacaaaatcataagaccttgaggattcatggatatagatagaaatgtgatttgctcaatccatcaaggtcataactttagttttgcaaataactccccaaacaagcagt

SEQ ID NO: 50842 - DNA, 1023 bp, Arabidopsis thaliana
ttgaaccaagcagcattcgcaggcgagcaccaaggtgcgtcacaagcagatggccagccagtctcgccaacgacaatgttaacatcaccgtatccaagagctttcatggctgagtatgtcgagtccatgagtgcatcaaacatgttggtgtagacgtggcgggtgaacgggtcacggactgccttgtacggtgttcggaaaattgcgaagttgacgtttttggggtcaaaaccaaagtaagggtacgggttaaccatgaaaggtgacttggttcggcgatggtaagctaggattggagccaatatgcctttgtcccaacccggcctgaatctaccgctgcttggtgcaccggtcaggtcataggctatgatgttaagtgagtgtgcggttgtaacctgagatcaattgcaacaaatagtagtattagaatcaattgttacctaccaatctccaacaattttcatatgataatcatgttggtctaaatttcctatgaaattggtacattatctcatttacctaggatcacatatatcatgatgtaataaaggaaacataaggcatggcagacagatgaacgaatctaaggacaataggataaccttggacggtgatgagataagcacgtgggatagtctaaatggtcagatcttaatccaatcgctaacattttcaagtttcaaatctttgaattttgctttgggaatttatttttttcctctttttaagaaactaacaatatacaagttggatgaaaaaaagaaagaagcaaacgcaacattctacgtttgcgtgaaattttggatttcaagttagataacagacgaaaaaatagagattgaatctaatttttcaaaataatcaatttttgttttgcatatttttttcaacgttgtttttcaactttatacatatgcgcaatcaatgcattatctctgatataaaacagggaaagaaaaaaaaacagtgcatttttcacgccaatcatcaattcactattaataattacaatttcttttagtt

SEQ ID NO: 50843 - DNA, 581 bp, Arabidopsis thaliana columbia
tctacttactcactgatcgttaggatgcatgatatgggagaaatggatgttcgtgcatgctacactgcaatttcggtgagttttaccaacttctattttccttttctctgtttttgtggacaccaaaactttttaggattaatgagatcaacaaagtctggacccattatgctatgtttcttccgttttcatggcttaaacatcacattcagattacgatatgatcttattatttgcacacttgcgcccaccagatactttgaatagagattactcgttttgagacttacacgtgttgcaaatgcatcctatggctggttttctccctgatatgtttgacttctctcttgtgacacaggttgcaagcatcctaaatattatggatgatgaactcacccagggcctaggagattacatcttgaggtagcttttcttattacttttatctcgcattatatatatatagctgaactactgttatacagttgtaaattcaggaattcattaattccctgggaaagctcttttaaccgatttatattgagcagttgcgaacttatgaaggtgcattggaggggacc

SEQ ID NO: 50844 - DNA, 894 bp, Arabidopsis thaliana columbia
ctctaacttgttataatttttctctacaatggttcatagttttaaaattatataaggaccaaccggaagtttatacggtcgatactttccaagtataccaaattgcaggttttagtttggaccacaaaaaagttcaatgatcaaaaaggctgatgtatcttctcactagtaataataattcataagcacacaaataatgataaatgaactgtctctgtcactagtaaagtccaaatgccgtctctatcgtacaaagatatttcaccttcttgttgttcgtgtcaccacacactcactgcaactggctacagatgttcccagataaaagcttcgagatatttttttatacatttattttgatccatatcacaatattaattgcaaagttttttcccttttcttcaagaaatagagcaatccgattcagtcaattctttgaagttataacagtaatcaattcgccattaattttatacatttaatcaatgtataatataagtatttttctttcataaatgggggaaaaaaatagagatagtttttgaccaaaaaaaaaataaaaaaaaatagacatagtcattggagatggttttactaaatttgggcttgttcaagagaagtgtcttttcttcattcaatcagaaccgtgaagaaaggagatcgttactttccattgatggctaaaaattaaaataatcacgataaatattaataatacaaaaaacaattaaaataacaaaaaaagatcaaaaattctctaacccttcattccttatctctgacgtggccatcaatcttcagattttcttcttcttctaatttaaatactcaacaaccactcttcacttcaccatcagcatcactaaactcgaaccctaaagaaaaacaaaaatg

SEQ ID NO: 50845 - DNA, 579 bp, Arabidopsis thaliana columbia
  unsure (1)..(579): unsure at all n locations
tcatcgctaaataggaatattcatatttaaatgtaagtagtaattaaaacacaagaaaaatacattcaatcaatactatgtgtagcatttataattaggtcaaattgttaatgaataatggatatattaagcgtaatttctataattgtatatagaaatactgtatcaactatctatttaaaaaaaaaatcccacaaccatcattgtcattaggaaccctacttcccccccattggttggtctgcccttatttcgctcccttcgtctttgcgcccgaccctctctcgcttggtccgctctcctcttgctccccacttggcccccctgtgtttctgccctgccttttgcctccgttcgccttttttttgggtcgcttcgtcaactcgctcgttctccgctctgttatctggcctctgccggctgtcttgctgctccacgctcctgcccgtctgccgcttgtcggttggtgggcccgtttgtttctgccatcccccctcgcgcctcanttctctaattccggcctggccctctacgctctttttttttttttttttcgttggcgtcctttccgatgttgct

SEQ ID NO: 50846 - DNA, 315 bp, Arabidopsis thaliana columbia
atcgccgtgaccatcgcgctggtgattttgaattactggttcttcgagcacacgatgctcggcaagaagctgcaggcgacctcgcaggacaaggagatggcgtcgctgcttggcatctcggtgtccagcatgatcatgatcacgttcatctactccgcagtgctcggagggctggcgggcattctggtggctccaatcctcttcgtctcgatccagatgggcgcgaccatcgcgctgaaggcattcgccgccaccatcatcggcggctttggtgacgaaccggagcgatcattggcgggatccgctcggcatcat

SEQ ID NO: 50847 - DNA, 411 bp, Arabidopsis thaliana columbia
agcagaacttattttatttttattattgtcttaaaacattatggatacactaacatatgattttattttttttaaatgaaaacaaagatttaaaactcaacttaaagccacattttgttgcccatattaatgaacaaaaaccagacaaacatttcaaagtttagcggggagcatggaaggtaggaacttgctaacatctatttcccctagcaattttcatctgttgcagaaaggagtgcgctaggacctccattgcctctttgaccatttctttgaaggctttaggtgttaccagcagatgaaggaccttgtcttggtccaattcaagaatcattccagtgatatttggtgcaaaatgtggctcaagttcttccaccataaagaacaaagtttcaccaatcaactactaaa

SEQ ID NO: 50848 - DNA, 628 bp, Arabidopsis thaliana columbia
  unsure (1)..(628): unsure at all n locations
ggaagacctgcctcaattgtaagtgaacaaacagacaaaccataatttttctatttggttatatgctgaaacaaaactaaacatttttcttgtcattggttcaggtgcaaaatcctattctgcagtctcatgaatatgacattcgaaggcttaaagcccgtttacaaagactcgagcgtcatatatctgttccggattctcctcaggagggaatccggaagtggtttgctgctgtttcctcgcaactattctacaaagttatggaagcttgtacacgaagaaaaccaattttgggtgatgcaatactgtcgtcaaccgttaaagtgcaaaatttcaatgcaaaaatttgtagtaaattgttgaagaagcctgcatcgatatacagaaagaaacacttcacactgaacagtgcttccttaagaatttcaggcttggcaggaagcatatttgcgtgggctgttggtttctgtctcttttctgctcagattggacatgtcttcgttcagcctaagaccagaagttctgagtcaaagccanaagtcaccatggaagaactaggtacgtaaaaaatagatgttgatttggtttattctgtgtatatatgaacggagcatgtgtatgtataaat

SEQ ID NO: 50849 - DNA, 493 bp, Arabidopsis thaliana columbia
caaagagaacttccgaggaaaataaaaaggagtgaactatgtgtcactaatgcatgttcacatccatataagagaaagaatactaaagtgaaactggacaaaccacataaatgcgtgcgaacaaatgtaaaagcacagtaaagtcaatcaataaaggtcagatctttggataatgtttataaaaaaacgtaatttgatgactccttttgatggaaaacgaattcacaccagatacagagtttactcatataaccaaaaacgagaaaatcagcgaaacccagcaagcatgagaaggatctataccagattccacaacccatttctcttaaaacagacccgatcgagtcaactagcctaaaccctaatagcaacaggaatcgactcgctcagtttatagcgcatatctcgtgacaattctctctttaactctactttgctaatcaaaagttacttcagttacatcatgtacatcatcatgattcataaacggaca

SEQ ID NO: 50850 - DNA, 632 bp, Arabidopsis thaliana
cgtaaaatatggcagttgcgtcgtcaaaaccggaagctccagatgcgaaattggctccggttaacaaatttgtctcatttgcttcttggctaaggtaagccaccgggtaagatgtaaaccctaaattctcagctgctcaacaacaaacaaattttaaggaaaaaggaaatgcatgatagattgtactataatgtgaattagctaggctggttcgaaccggtaaagtctgtggcaagttttccgttagagaaacggccagttgcactgtgggcgacgaagtcacgtccgtagggaggaaaattggctttgacgagggtaatacggtggttgttgttacggcatcaacaactgaatctcccattatgattagagccggtacaagtgtctcaccggtcccaacgccggcgtagaaacaggcgataaccgataagcacatcgacattgtaataaacatcttcattttctgtttgaatgcagtaaaagattttgagaggactgagtacgaagaagtcgtgaatgattagggttttataggaagagagattaaaggaagttgcttgaaaaagaagataaacttttagtttgtttgaagccatcttcgggagtaacgccgtcgtattcgaatttaaaga

SEQ ID NO: 50851 - DNA, 770 bp, Arabidopsis thaliana
tgatgaggacttcgacaagaacctcgcattcgggttcacgctgttttggtatgaagcttatgcttctttctctggaaaaccggcgtataacgattggtacatgtcgtgctacaacgtcttcttcacttcacttcctgttatcgcccttggagtcttcgatcaagacgtctctgctcgcctttgtctcaaggtagagattcttctctgtctttcttgatttaaaacaaatcgcttagcgtttcttgattttggtttccgcagtatccgttgctataccaagaaggagtacaaaacgtattattcagctgggaacggatcctaggatggatgttgaatggagtcataagctcaatgatcattttcttcctcactatcaacacaatggcaactcaagcttttaggaaagatggacaagtagttgattactcggtcctcggagtcacaatgtactcttccgtggtctggactgtgaattgccaaatggcgatttcgataaactacttcacttggatccaacattgcttcatatggggaagcattggggtttggtatttgtttcttgtcatctacggttcccttcctccgacgttttccactaccgcgtttcaggtcttcgtcgagacttcagcaccgagtccgatctattggctcgttcttttccttgtggtgttcctgctctcttgccttattcacttacagggcgtttcagattaagttcagaccaatgtacacgatgatattgttgacagaggagacagacggacagagac

SEQ ID NO: 50852 - DNA, 480 bp, Arabidopsis thaliana columbia
tcccttttcctcctcttggactttcgttttctccgtcacaagctctggctcctcctcttggttcttgttcttcctcttcttctttatcttctcctccttcgagtctccgtcgagactcatcttttgctccggttctatctccgtatcttcatggcttctcttcttcttattcttatttttcttctttttagagtctccatcgattattttcgttagctctggctccaattcgagctcagactcgtcttgacttctcttgttcttcttccccatctctgccgccggcgagtgcagcagctgcctgccaatttcgcagggcttatgtggttttgggttcttactggattaatgggcctcaattatcctaatctattgggcgtattttacggcctgttaacttacgttcttagtacataacttgaagcatttgacatttgttctagacgactatgtcagagtaacttgaaccatttatgattt

SEQ ID NO: 50853 - DNA, 492 bp, Arabidopsis thaliana columbia
aggatcccctcaacatctaaattctaattaaaatagtaaatatgattcatttgtttatacctaaaatctgataaaatcattaaaaagttaaaaatcaacaacattttaatgtatcttatatattagtgttgacaatgagtagattagtcaatgtatcttatatattagcattgatcctttaaacttttgatgttggttcctagcattatatatatttcccttctcatagaccccccgattgattcaaaaaaaaaaatactcccagattcaaataaattgtttttatgggagatgagttttcgttaattcgtttttaccgacaatattacaaacttacaaaattgacccaatatttctagaaagttgactaagatactttaatgcacggtacagatttattcattacgtttagtgcaaggtcaaagagtttataactgagttataaagtaggaaacgacaccgttcaacagaaaccgtcattgacctgacagt

SEQ ID NO: 50854 - DNA, 524 bp, Arabidopsis thaliana columbia
acttgtaaaacatttgtcttatcatcattcgaagatctgaggatggttaaatctttcagaagtggagagcctgagataagtttctgcaacgtggtcttgttggggtatctaatatatcgtaaatgcatgatctttagacaaggtaaggaaacaaagtcagcattacacaaggtgacctcacagagtcataagtgtaccagtgtctcaaaggtttataaacacgagggtatctcaccacatcaaaaatattcaacatcaagatgctgaatcctacgcctagccgcaacattaatccatgacgagatatcacatctatcttgacggtaaaaacttaaccgtactttgtgtatcgatgactctatgtgggaattaaggaacctttcaacaaagatgtctccatctttagaagatgtgtaacggactaagtccaattcaagagcaaattgccaaagatgtctccatattgtggacaaacacttgttttgacagtatccttagtagaaaggtgaaatagtatttcagat

SEQ ID NO: 50855 - DNA, 563 bp, Arabidopsis thaliana columbia
ctgaaatctttgagtgctttctcatctaatcaggcccataagtaggccattatcatcactattagtaatgggccaaaaccccgtgaatttggtcacgcacgactcacatgagacgacaatggttgacctctggactctcgagtctccctggattactacactcgagctcgacgatccttagaccaacttcgtcttcttcctcgagagcttctctgatctcctacgccgtgaataatttccacacgatcgcatcttcttcgtgtaatagctgatagcggctgtgttctgatcgatcagtggtcactctttataggtaagtaaagaagggattctattgtattccgatactgctacgagctgtcttaactccacttacttctaggccattagctcagtaagctcagtaactccattctcttatgccagccttacctcaattcccttcttagcctcaacagctaaagcatccctttctacagctcctgaaacagccgaagaaccacaggcctaagtaagtgttgtgttcaactttctataagtaatatgggttggctggttggaag

SEQ ID NO: 50856 - DNA, 602 bp, Arabidopsis thaliana columbia
gcaataatactgagcagaaaacgaattgacacatgtttcaccacaggtgaaaaaatctcctgatagtcaaccccttctttctgtgagtaacctttagctactactcttgctttaaatcgaggaccttccacacccactattccaggttttctcttgaagacccacttgagccataggttctgtttttcatctctgtctactagtgaccaagttttgttcttcatgagagactctatctcttcatctgcagctgtgaaccacttgtcactattagcatctcttaatgcttcctgaaaactggagggctcagacttgccaccgtcttctgttacgaagtatgcgtatccggctatctcatctaattctgcttcttcagtgtattagtcttctagtctggttggtctcatgatctgtcttcttggcctgtgtttagctatctgatagctccctgacatttgattctcaactcttgttgacatttccactgaactttgtcctgaatttatccagtatcttgctttaaagctccaccttaagaaatatcctcttcagacgtgttatttcatgcaatacacaagtagctttacagatacattggtaag

SEQ ID NO: 50857 - DNA, 557 bp, Arabidopsis thaliana columbia
cgtatttcatagtctccaattcgatgcaagatgtgataaaatccactttctttcaaatcaacaagcttcacagctccgtcaacaggatcaaaaaccctaatcaaagcttgaatatccacagcaacaacgtcacagatctccaccattttctcaagcgtctccggtaaaatctcgccgccgactccaacggccattccgaaatcaaatctcgaatcgggtatatccgaaggaagaatcggatcacatgcagagactcttttcaacacccgatcagcatgaccgatcccatcgattcccagatcgaaatacgcctcgaaaactgttgtttccttctccggagccacgatcggagagtgggtgacctcgtatctgaagtcgtgtcctactttggagaccaaatcgcaggagacagaggaagaatctaagacattagatatgaaagaggcggcgcgctaagagtttcagctacgacggatccgttttggattaaaacgtcgtggcaataatttccgacgatgagaacgcggcgattgggaattcgcgcggcgagtgagacg

SEQ ID NO: 50858 - DNA, 544 bp, Arabidopsis thaliana
aaagaaacatggggccgagatacccaaagctgcagaagctcgggattgggatattgaccaaccttgcacttgaggccgaagctcgggagagaattggcggaactggtggtgttctgaaagagttgttcaacattttctttaaacgggaaacacgcggagatgaagggaatgagggatgtgtgaggatcgctgcaggagaagcaatagcgatgcttgtgttggagagcaagagcaactgcctccatgttcttaggcttggggttatgggaagacttgtggaagcacttgaagttccttcgatccgtgtgaacgctgcgagagtgttgagaaacatgtgcttatactccggggatgaatgctttcatgacctgaagttcgttaaagcagcagcaccaacggttagtatatacacttacgattgaaaaacttaggtacaactcgaatctagtataactattttttcattttgttgcaggtcttgaaatcaataacatcagaagacgacatattataggaagtgatggtgggattagcagcacaagtg

SEQ ID NO: 50859 - DNA, 584 bp, Arabidopsis thaliana columbia
tcgaggttattgtggtttgggctgtaaatgattgcttctaggattgccattttatcctagaggtgattggtgcactcaaagcaatcagattttgtagcttctcctcttgtggttcgttgttgtgcagaggatgcatgtatcaacaggtaaaagttagagtccatctaattttgattcgttgagaggatagatgggctttgccttggtgatggaatatatgatcctcccaattcttcctaattccgccaatgtttagacgggatgagttcatcgataaagttgtcgtcatggctaggacctctatgtctaacacattgatgcatcgcacatctattatagtttgatctgcctcttaatttcgtctcaattgcattattttcatgcctagttactgcttcctctcctcactttcgacatagttgttgtctcgtgtgttgcatatatagaaatggtaacatcgacgaaactaaactagataggacctttaaatctgggcattaagtcaataaaagaagcatgtctcaatagagttttgacgactcattttttctttagtttttctctctatttctcttctttataat

SEQ ID NO: 50860 - DNA, 492 bp, Arabidopsis thaliana columbia
atcaaatggtgttcaaagactatggaagtggatccgcaatgagcaaaatccaactgggaaggtgattcgttgtacctttcaaattttacactcatgtggtttgttgatatatgtgagttgttgagtcacttgtttgaagctctcttgcataagtgtctgaaattttgtccttttattggtgaaggcaactgctagtgtaactccacagcattggcagccaaacagcggtctcctaatggcaaatgatgttcccgagaatcctgaagggagtgttccgtgtatagcactttccaagaatgactcatacgtaatgtcagcttgtggtggaaaggtttcgttattcaatatgatgactttcaaagtaagcagcttaatccaactttttctgttctcgggagcatctcctaaatactgatacctcaggagctaatgaaactatttgagtaatatgcgacgtaaatgcattatcccgttcgtgcaggtaatgacaac

SEQ ID NO: 50861 - DNA, 489 bp, Arabidopsis thaliana columbia
caatggaaaagaacaaagccgtggagcctcctgttgctcctcctaatggaaccaccgatcttctgtttccttcacccgagaatggttcgggctctagtcacttaaaaagtctcatctcaaagggggaaaacaaagtcgtggtgcctgaaaatgatgatgatgatgatgattatactgatactactatcgggaggataaggtggttgaacaagaaaaaaagatcaagaccagagtagtaatttatctatgtccctttgatttttcagttttctattgaggcttatgttcacctctcttttttttttcatgcaattgtttcttcgtttcgtttcaaataatctctgttgtttcgattaattcatcagtcccttttgttcaattcctatatctcatgattgctctaaaattcctgcaattttcagaattcatggcccaattattcgtaagcaaacgttattttttcaaaaggttaaagaggttaaagagaca

SEQ ID NO: 50862 - DNA, 512 bp, Arabidopsis thaliana columbia
ggtttcaacttcgctcagcatgacactaaagagaagcttgagtatgttcattatgacctgtggggagcacctacaatgccaatggcattcagggaactgccaatactttatatcattcattgatgaccatacaaggaaggtatgtgtgtatttcctgaaaacaaaagatgaagcctttgagaagtttgtaagttggatcagtttggtggagaaccaaagtggtaacagagttaaaactctgagaacagacaatggtctggagttctgtaaccggatgtttgatgggttttgcgaagagagaggtatccagaggcatagaacctgcccatacacgccacaacaaaacggagttgttgaacgcatgaacagaactatcatggagagagtgagaagtatgttatgtgactcaagactgcctaaaagattttgggctgaagctacacgatacgtgcagtgctctcatcaataagactcttgctctgcgaataactttgagtatccggcaagaaatg

SEQ ID NO: 50863 - DNA, 665 bp, Arabidopsis thaliana
cccaaaatttgtacaaaaacatgaacaaacataatgaaattcaacaaagattaatactccaacaatccagttccctctagtctaacccaaacttgaaagagaaaaaaatggagacctgctcagactcgtgaagcgaaatcttcattgagatgatggaaacttgagaacaaaatggctaaagacattgtctatttcttaacttgaaggcttctttctccacagagttgtcccgcggttgatctcctgaccatctccagacaacctcaggaggtgcaagaactggctatcgttgtggccctgtgtgccagacgtggcagagcgattggttccaccaatttcagaggtggtggtggtgagtgaatccaccacatcgtcttgttgacattctcttctataatccagagttatgacctgaagctcgtgcgtgtctacaatttcttgtggtatgctctgcaattaccaggaaacaagatcatatgattactaaagttcacatacaagcacattgagctttactaataaacctagtgacttacctcgagaacccatccaatataggtgacattattgacatgctggttcatgtcgagatcagctcgtctaggctgcaaaaacatgttcacaaagcctttaagatattttgaagcctaaagttggagaaagag

SEQ ID NO: 50864 - DNA, 493 bp, Arabidopsis thaliana columbia
ccagtgtgctttaaagcaatcttgtactcaacgcccagcttttcaagatactcgggcagaacgtgttccgggaagcccggttgcttttgatcgaggttaacagccaccagcgaaaaattgattggcgcgctttgctgcaaattgcgcagaatctccagcatggtatagctgtctttacccccggagaggcaaaccatgatgcgatcgccttcttcaatcatattgaagtcagcaatggcttcgcccacgttacgacgcagacgtttttgtaatttgttcaggttgtattgttctttctttgtaatttgttgattttcttgcattatttcagttctctggtactaaatggggcaaattgggggcaaactttgcaactacgataaccgcgcattcaacatggctatctgttcgtcgttcatgtcatcaatccacataccgtaaatttcatacaccatctgcgcagtttcatgccccatttggctggctataaatg

SEQ ID NO: 50865 - DNA, 518 bp, Arabidopsis thaliana columbia
aaattattaaaaggtgaaagacagatgagagatgccaccagattcttcaacccaaggaacaaagaaactgagtttaccagtttcttcttcccacttaaactcagcttccttgtcgttcaagtaacacttcaccggagctgaactcgaatacgccatgaatcttccttcgcctttcacgtccactcttatgctgttatcaccagtaaccttcatgtcttggactgttccgacgcagttgaacatgttgatcaaccctagaggtgcgaatctaacccctgaacttacaagttccgtgactggcacgaaactcaacaggtcaaacgcggatggctcaagggttatcttcatcgcttctgatttcgagttcatgaaaaggatttcttcagattgttgcttgtaaaccaagtaatctccagtgtaggtcacctgagagcctgcagcttctggattctgatccattcaatgtccgagacatgaactgtcccgaaactgtcgtgtaacattctttgtacctttga

SEQ ID NO: 50866 - DNA, 1803 bp, Arabidopsis thaliana
ccccggttcacagcgacggaccgggcctaagttccctggaaaggggcgccagaaaagtttgaaacagaagagattgtgagactagattgcactcatgttgggatgagtgactgcaaacgaattggtgtgaaactaaaggtataataaactgtaaatggtttgcttgtcttatatggtcagtcagagtctctagaattgatctctcatgatgctgtgatcaaaattgcaggagatggatccatgtgttcccatattgttcaaagatgagcagatcatactctggagagggaagaggactggtgaagaagagcttgttactctatgaatctttgatctagaatcatgatcatgtgagtgatgtgacctgaacaaatccaactgtagaccaaaacttcttcatcgatacaacagatactaaagtttcacatgtctcagaagtagtcatagatacaacaatcttggttgatttgtatattcgattatgtacttcggtttgatttattgaactaaaattggatcagtccaaaattgttctttatgaaattgactaattttattttatttttttgattaagttcataatttgatttttagagtaatccaatttactgttctgttgtcatcattcttaccttagaacactaaccatgttcaattactcaatatcatggcccggttcaaaaccaaaccggtcaatggtagaacaactaatgggctgatataaaaattgggcctataaaaaagcctacaactgtatatcataactataaaaatgctttattttcgaagcgaaagtttaggttttggtttttttgtccgtcgtagtgatgcagcaaccaccgtcaaacgccgccggagctggacagataccatcaggacaacagcatttgtggatgatgatgcaacagcagcagcagcagcagcagatgcagttgtctgcggcgccactaggtcaacatcagtacggtattggatctcagaatccaggatccgctagcgatgttaagtcgttgtggatcggagacttgcagcaatggatggacgagaactacatcatgagcgtctttgctcagtctggcgaggtaattttacttgactgtttatcaaaatcgagatgaacatagtcttttgcttatcatgtagaagattgattaagtattgttctttgcaatataaatcttcattttttatggttagtgaatacttggtgtttttgtttggtggtttcaggctacatcagctaaagtcattcgtaataagctgacgggacaatctgaaggttatggattcattgagttcgtcagccactctgtagcagagcgggttttgcagacttacaatggtgctcccatgccgagcactgaacagacgtttaggctcaactgggctcaggctggggctggagagaaacgattccagactgaagggcctgaccataccattttcgtaggtgacttggcacctgaggtgactgactatatgctctcggacacattcaagaatgtgtatgggtctgtcaaaggggctaaagttgtgcttgacaggaccactggaaggtccaaggggtatgggtttgttaggtttgcggatgaaaatgagcagatgcgtgccatgactgaaatgaatggtcaatactgctcgacaaggcctatgcgtattggtccggctgccaataagaatgctcttccgatgcaaccaggtatgttttattatgtaggaactgtgtatattgagtatgttgaaagttgatatgaagtttgtttgtgtttgtttaaccttctatgttgagcattatatttgagt

SEQ ID NO: 50867 - DNA, 566 bp, Arabidopsis thaliana columbia
ttccattgtggtgcgtgtgtctgttgtgcttgtgtctgtggttgcgtgtgtggtgctcgcctccttggtgcttgcctcctctgtgtttgtggtgcgtgtgtctgcggtggttgcatatgcgatgactgagaggcctgtgatccttgcgaggcttgagatccgtcccatgtttgtctttggccaaacatgatattccttggttcctgattcaaagagaattagactatgtaaaagaaagtatgaagcatcattatattaggggttgcctgattttatagtcataaactaattgcattctcagcttttccccttatactttttgctcatgaaattttcaccataaactttgataattctttaaattacaacatgtactttcggattcatccttaaaaatacatttccaattgaaccggtcattaaaccgggattaactacaaatccgcgtttactgtaccgcgattgcgatttatttgattaatctcctatatccgttaagaaaagggttgactaattttatagccataaactaattgcattctcagcttttccaccacactttttgc

SEQ ID NO: 50868 - DNA, 371 bp, Arabidopsis thaliana
ttatcaaagtttctggtggaaatttcaggagcaaaaagtgtagggggaaaagctgagaatgcaattaatttatggctataaaatcagccaaccgttatattagacaatataaagaaagtatcaaacttgatccttccttggtcttcctcttggtcttgttagttgcacttcagcagtcgggtttgagcaagataacctattgtgcccgtcttgtatgcagtttccacatgtcatgaccctattcttgagtgacattctggtggttgtggttgatgtcttagcttcataccttcctctccgcctagcatggttaggtggtctaccaggatttgctttcctccatgatggtggcaagactcctaatcgtattc

SEQ ID NO: 50869 - DNA, 660 bp, Arabidopsis thaliana columbia
taactttttaataaacatatccatccgcgctacaacgcggtcaatatctagttaaagcatatattgtaatatgagatttgattctttttattaactgaaaagaaatgaattaaaatgaaaaattagggtgattaatgcgaattgatccccttaaaaggaatgttagtgtgtgggtgattagtcggataaatcacaatagcggtatagtaaacgcggatttgtggttaatctcagtttattgaccggttcaattggaaacgtatttttaaggattaatcttaaagtacatgttgcaatttattgaattatcaaagtttatgtgtgtgtgtgtgggggggggggaaggggggaagctgagaatgcaatcagtttatggctataaaatcagctaacccaaatttaaatgatttttgaaatttgttttcttttagtttcctaaattttagtaacaaaatcgatttatatttaaatttgaaaataagtttgttaaaacaatgtcaatgacattgtgttgtaaataagttccaagttcaggatttatttgataaaagtgttgccaaaatgtatatgtagatggctgtttttaaattaatattattatccttacaaaatgagtgtttcaaaaaataatacatgctaaattttttaatttttttttac

SEQ ID NO: 50870 - DNA, 524 bp, Arabidopsis thaliana columbia
aagatataaattaaaaaaaaatatcttatctaattctatatgtgcatgtggtatgtgtaataagctactacagacacgtaaacagatattactactttgaatagcaattacatttataactttacaaagaaagactacatatgtagtaaataaatctcaatattcaatctcgtttagccatttgtcatgatatttgtatgtagatatgctatataatatcacaaatatcatattcaagtagtaaaaaatctaaagaaaaaatagttgccaaaacaaaagagataagtaaaactagtcttcgtagttatctctctgaattatgcatggatatcattcccactcttttattcactctactattaagaaaaaaaaacgtgctgtatatgaaacaaaaaaaaaaacccaaagaaattgttgatgtcaattgatataacacatatctgaaattaaatatttgatgtagcacaagaaacttaaatttaaaaaccaaataaacttataaagggtagactttccccacattt

SEQ ID NO: 50871 - DNA, 494 bp, Arabidopsis thaliana columbia
tgatttttaaaaaaaatttgaaaaagaagaagaagattttttaaaagatagaaagatgattatagaaaaaatgatttctaaaacctatgacaaaataagaatctataaagaaaaaaagatgcagtgattttcttatgggttggctaattttatagccataaactaattgcattttcagtttttccccctatactttttgctcctgaaatttctaccataaactttgataattctttaaattacaacatgtactttcagattcatccttaaaaatacatttcaaattgaaccgatcattaaaccgggattaaccacaaatccgcgtttactgtaccgcgattgcgatataccagattaatcacctatatccgttaagaaaagggttgactgattttatagctataaactaattgcattttcagcttccccccaacactttttactcctaaaatttccacataaactttgttaattcttaaaattgaaacatgtac

SEQ ID NO: 50872 - DNA, 622 bp, Arabidopsis thaliana
aattgacatttctgaaatgtggataatacaggtgtcgtacatgatattggcgagagtatcaccggttacacattctgtcggaaactgtgtgaaacgtgttgtggttattgtgagctctgtcatcttcttcaagacacccgtctcgcctgttaatgctttcggtaacatccagtcttattctcttctcggcttcagtgaatacgcaatactttggaactcattgtcgtttatttttgtctctgcggcaggaactggaatcgcccttgcgggtgtcttcttatactccagagtgaagggtattaagccaaagccaaagactgcttaagcaaatatcggctaatacctaatgtcatatcactcccgcgctttggatttgtatacaatttctcgagctaaagttttcagatagatggttttattcttttgcgggtttttcacgaagtttcatcatccctttctaagcttttcgctgcagccatcggttctcttagagtttgttataagttctcttctgtgtctagacaaatgctaaactcttaaatttcttacagtttttccaagaataacttgtcaacacattctcattactgcttttagttacacgtttaaggtttattaggag

SEQ ID NO: 50873 - DNA, 542 bp, Arabidopsis thaliana columbia
tagatctaaaagtttatacaagaagaaaaggtgaactcggaaaccgaaaagatggagaaggaaagtcaggaaaactcgaccagacccgatgcttcgtctactgttttctcttcctctaaggtaatatctctctataatccaaatatccaatcctttttctcttatgtgggtgatgcgatatttatacaaattgcagagtacatgcgcaagccatagctatctcaaagaagctggagacttgatcagtaggttgcctgatgatattctccaactaattctctcctatcttccaaccagattggcgatcaaaacttccgttttatccaggcgatggaggcatgtatggtctgatacatggtccctctccttccatagggacagaccggatgctccttgtattaacagaatcctagatcgctacagggctcccaagatgatgagttttagtatctgttcttgttgcagggcagcctgtatcagcagacccgacacgcatgctgacatcgacagttggataacttcgccatgtccgaaacgtggag

SEQ ID NO: 50874 - DNA, 712 bp, Arabidopsis thaliana columbia
tcgggtaaatcgcaatcgcggtacagtaaacgcgaatttgtggttaattccggtttaatgaccggttcaattggaaatgtatgtttaaggatgaatccgaaagtacatgttgtaatttaaagaattatcaaagtttatggtggaaatttaagaaacaaaaagtgttgaggaaaagctgaaaatgcaattagtttatggctataaaatcagccaacccaacattcaaacaactcaatcttaatcgttcatcaccattaatttcttctaaagtcaataaggttgtctaaggggatgagcgtgtaaaaccgaaaaaacataactagaataagtaaataatccaggtcatacagtagatttgggatgataagtagtaacctcggacgattagctagaattctgggaaaccatctatgagcggtacccaattgaacaaggcctatgtagtaagattctagaaaaagctaattttgattcaggcccaagtttcaatcttctaagctcaaagcccaacacatatagatgatcaatccaaatgatttggtcctctaatggtcaatgatgttctagattatcaggccttaatttgaattgatattgaaaaagaaaaagaaaaaaagaaaagaaagaatcagaacaaaggaggcaaaacgacgtcagataatatcagaataagatgggtaagagaaaaatctaatggttgaatcctattggt

SEQ ID NO: 50875 - DNA, 470 bp, Arabidopsis thaliana columbia
gaagaagaaaacaactactacaccttttgagaagattcttagattcattaaagggagagtagtgaagcagagaagcatatatacacttgcagatgagaaagatttggatgctatggagcttgagtaagttcggaaaaaccacgatatctcatgaaactaattagtcttttaagttctttaagggactaatgacttaccggtttaatgtaggctagaggaagaggcctctctggtaaatgtgagaccgaggacattgagactccttcaacaacctccaaaggattggaagatgacgagagctcgaaaacggttttctctggaattgataatgttaagttagtgagtcgccttttccccatatggatgatgcttctcatgttcgcggttatcttccagctaccagctaactttttcaccggacaaggtgtgactatgtagagaaacattgggatcaacttcaaaatccacct

SEQ ID NO: 50876 - DNA, 872 bp, Arabidopsis thaliana columbia
ttaagaagggttggctgattttatagccataaactaattgcattctctgcttttccctccacactttttgctcctgaaatttccaccataaacttcgataattcttaaaattgcaacatgtactttcagattcatccttaaaaatatgtttccagttgaaccagtcattaaaccgagattaaccacatatccgcgtttactgtaccgcgattgtgatttacccaactaatcacccacaccgttaagaaaacaatgttgttttgtaagccgacaatggagcttcaagaaacaccacatggagccgatacaatcacactcacacaaagaagcagtctatgtgatcaatgagagtagttctagttctttattgatttagattgtcattggaacaatcttcaacctcttttgtctattttggatgatgtattttcggaagttgattctctttaagatgatattatttaggttgactgatatgatttggagtcttatctatccttatgattagaagttttatctagttcgatttgtcattttccttaccaattaacacaacacataacatatatagatagattcacattataaaacaaagacaaaacgacgtcgttttcttaacgggtgtgggattagtcgggtaaatcacaatagcggtataataaacgcggatttgtggttaatctcggtttaatgaccggttcaattgaaatcatatttttaaggatgaatctgaaagtacatgttgcaattttaagaattatcaaagtttatggtgaaaattttaggaataaaaagtgtggaggtgggaaagctgagaatgcaattagtttatggctataaaatcagtcaacccgtgttcttaacgggatata

SEQ ID NO: 50877 - DNA, 876 bp, Arabidopsis thaliana columbia
  unsure (1)..(876): unsure at all n locations
aaaggctcggttcatatgtggtgtgcactcgaagacaaacaaatttcacgcgatgttttactctataccccccatacactgccatggataccgctccatgaggtccctgatggtggacattatattatccatgacacgcggcattttgaagccattatcaaagcagtttgtagtgactagtggaagatagattataacacaaccccactctaaaagatttgtatctaacatcagtttaagacaaattatgggtatgtaagtttcatgtgacaaagaacattatcttacctatttacaataatttatataaatctggtatgtcagatagtacagtttacaaaaaaaaaatcaaatgtcaaattgatccaaatgaaaaatatcatgacatacttttttgagcatgggagagagtcggatggagacacatgaacgaaaggtaaagttgacccaaaattgttactgaagtcctcactttgatcacgagatttgggttttgtgatttgggccttaccctaacccatttcgattgagggcattttagtcattttatataaaccgacaaaccggtaaaagcaaaatgttttcccactaaaagactgaaaaaaacactaaaccaaaattaaatcatcaaaaatcaaaatctctaaaatcaaaaattcgcattttctctctcgccggagagatgcaacggtttcttctacctttactcttccttgcactatcgccgccgggatntatgtcattactcttcctcaacctcttcaccttcttcgtcctccgtttcttccgacgcctcagaatggcgtccagctcgagccacctactacgccgctacgaatcctcgagacgcggtgggcggtgcgtgtggatacggag

SEQ ID NO: 50878 - DNA, 540 bp, Arabidopsis thaliana columbia
gacatatttttatttgctagaataaaaagagatgaatacaaattttctctagaaattttttgaaatcatttcacccgtgacagcaaggcctttaatcctagttatctgaataacagagtaaataaatccaaaatttgaacgtcagttttgttgtttcagcaacattttcgttagttgctggatttagttttcaaaaatgtttgttcatgttttgcttatgttttcctcaaaattggtaaaatttttacttttttctgttgatttttcttttgctaatatctgatatatttcttggaaaatacgtctaaaattatatatattaagttaatgaaactgaataaagtaaagtaagtagggaattggtaaagtgagaacttaagctgtaattatttttatttaattttaataaagaacttacgctgtaattctttttaattgaaaaacgtgttgacgtggttaaacaatgcaaaaaaatagaatgcatagaactttgatttgaagtttgccgtaagagccaaaaattaagttataaacgaggtg

SEQ ID NO: 50879 - DNA, 608 bp, Arabidopsis thaliana
atacccagacccgttaagaaaacgacgtcgttttcattcttcttctttaactctcaaatcgatttggtagtcctcttcttttgactttcatctctgtctccatcgtcttctagattgacgtctccatcagacgctatgtcaccatcgtcttctctattttcctctccatcagaagctctgtctccatctatcccgacgtcctctccctcgattctggtggcttcgtcctcctcgactccgctatcaccactatcacttccatcgtcggcttcaatgtcactctctggaggttcgaaatcggggtcatctggatcgctttggtaaatcaatctttcctcccaccaattcttcatttctccctattcgaaacccaaatcgagacccaaaaattcgaaccgaagaagaaaaccccaaatctccttttgtctttctctctcaagaaccctaatttcacagtgtcgagattaaagaagaacgactaaatcgatttgagagttaaagaagaagaatgaaaacgacgtcgttttctttctctttttgatgagttaaacgaaatgaaaacgacgtcgttttcttaacgggtctgggtattagttgggttaatcgca

SEQ ID NO: 50880 - DNA, 164 bp, Arabidopsis thaliana columbia
  unsure (1)..(164): unsure at all n locations
nnnnnnnnnnnnnnnnnnnnctaaaggctgatcaagctagggtcggggacaggcaactgataagggttgcgggatcgatcaaccatgagcaaggcatgcgacaagtgtcgaaggcgtagtgtcaaccgatctactatgaagaaaaggtcgaggatcggctgaac

SEQ ID NO: 50881 - DNA, 1314 bp, Arabidopsis thaliana
cccttcattgcataatgcaagacaacctctttgaattcaaaaccagtgaagaatgttctgcctatagctaacctatcatccgaagctaacctaatcttcttatctctagtgatcacatgatcttcttcttcattattactttctggtatttcgttccttctaatctttaactcatcataccacatagctactgcttcctctatctcgaactcaaacctctcggccaaatcttcttccggctcatccttcttctgttttctcttcttcttttgaccttcttcagcctcttcctcctttcttgtctcttctctcgtcctcttcttttgactttcatctctgtctccatcgtcttctagattgacgtctccatcagacgctatgtcaccatcgtcttctctattctcctctccatcagattctctgtctccatctatcccaacgtcgtctccctcaactccggtggcttcgtcctcctcgactccgctatcaccactatcacttccatcgtcggcttcaatgtcactctctggaggttcgaaatcggggtcatctggatcgctttggtaaatcaatccttcctcccaccaattcttcatttctccctattcgaaacccaaatcgagacccagaaattcgaatcgaagaagaaaaccccaaatctccttttgtctttctctctcaagaaccctaatttcacagtgtcgagattaaagaagaacgaccaaatcgatttgagagttaaagaagaatgaaaacgacatcgttttctttctctttttgatgagttaaacgaaatgaaaacgacgtcgttttcttaacgggtctgggtattagtcgggttaatcgcaatcgcggtacagtaaacgcagatttgtggttaatcccggttaaatgaatggttcaattggaaatgtatgtttaagcatgaatccgaaagtagatgatgtaattttgggaatatgaaagttgatggtggaaatttaagggcccaaaagtccgggggtgaaagctgagaatcgaaatagtttatggctcgaaaatcagccaacccttagattttatgtcgtaataaaagcattatttgaagaaaaaaatcatatcttttggtttttaaacccttatatagttattagtatgcttctaaggtaagaattgattttttcctatccatcctagagtaagagttgatttcttgttcaatagctagccgttccgttaaaaacaatggaatgaccggtttgggtaaggactaaccgggtttggcaaaccaaatgccgtaattattgcagacgtgtcacaatggaacactcagtg

SEQ ID NO: 50882 - DNA, 464 bp, Arabidopsis thaliana columbia
acaaccccgtacaagacattttacactcgaggatctccaatgttactattataaacacacaagattacacaatcacactgtgacagaagacataagagtcattggagccaaaaatctctattttttactgattcaaataatatctgaggtcttcggcgttgggttggtctctgagtttagccattgctctccgttcgatcttccgaatccattctttgctaactttaagaagcttcccaatctcttccagggacttgggcctgtagtcttgaagaccataacgtaggaccatcacttgcttctctcttggctctaacccttctagaagatcatgtatgtctctcctcgcgctctgcctcatcacggcctcctcaggactctccatcgttgtgtctggtgtaaattcctgcatactcggaaaacaaacgttgagtctcaaaactgaaccaaactgaacaaaaaga

SEQ ID NO: 50883 - DNA, 473 bp, Arabidopsis thaliana columbia
tatataacttttgaaaacaacgatatatgtaagacaagattatatatgtgagatataaaataaccattataaagatttttgacatgaatcaaagggtgattcgtttttaataatctctgtttgtaataattgtattaaagattattctgctagttcactgcacatgcttgtccaaaaaggtgttgagacatcagttatttttatattggaatcccacaaatagaatttggtatatttgagaaaaattatttgatgaaagtcttcattttaaagaagtgattatgcacctttgggatggtagatacactggctgtttcaactggtttatattcattcatcttccactttgtcttctcccagtaggtgcttttccggtatagaaaaccatcgtcttctttactccgatcactcggttatccggcgagaacacgggtccatgtgaacaagttgctttccagtatcctgagacagtg

SEQ ID NO: 50884 - DNA, 517 bp, Arabidopsis thaliana columbia
caaacctcttcatcatgtcgcaacgtggcgtttcgcggatatatccccattgttgtctctgaagctcatggcgacaattctggccaagtatagacaagtaatctctatcaacttgctcttcaaccctctgtctctcgaagctacttatcggatattcttgctcgaacttggctgatctcacaaagtaagtgacgcccctatgcgtggtgaatttgagctcgtagttatacgatgagaaagcgagtaaattggttgaggagaaggcaaaaagttgagtagtagtatgaacacaacaggaagtatttgaagaagtacacgaggattgaatcctgtatcagaagcttgattagctgttctagttcctccaccaaaattgaatgatcggaactgagtagtagcaggattcatttcaccaccaccaaagaagcttctgaaaatctcatcagcatcaaattcatcgtcgtagaatccattgaatccgttgtttcttctcgcatctcggcgtggttgataagca

SEQ ID NO: 50885 - DNA, 568 bp, Arabidopsis thaliana columbia
cttcctgaaattatatatccattcatatttttataaaaacatatacacatacatagtccaatatgagctaaggaaaaaaaaatggtgaaaatatatagtaataaacggccaaagcgatgagtcctgtgacgattccggccttaaacaccatccctagatacttggagtcaaagttcaaaagttgaatagaaggaggatttagtcctttctttaaaggcccaacctgtattaagaaacatactattaatagaaacccttgatgctcaagctttaaaacttgttcgcttaattaagtttaattatgtttgcatgtgattgtaatttgttagtatataaatatgtgtatataactgcattgctcacagtagcaatgccgtgtgctgttcctttcaccaaataagcaacaacgcaacccacaacgaccaccaccattggacccattgctgatcccaaaatagctttgggtatctttgcttctgcaatagtaacaaattttcaaacatgttaattcttgttaagcatttgaggagccatttgacattttacatatgtggaagggtggctatgt

SEQ ID NO: 50886 - DNA, 696 bp, Arabidopsis thaliana columbia
cccttattttctcagctaaggacgaagattttattgggtgaggttttgaggccacatgtttggaaaaatgaaatctaattttaatcggctaagataaatgtagtaatcctcatttggaaaatgaaatctaattttaatcggctaagattttaacataatccaccgagtagttttaacttttaatccgacattagtggatggggagatatttagatagaggcattatccaattattaacaaaacaaaaaactgcccccaccgtcgttgtctaaaaatatattatattaaaataattggcaaagacgaagacgaagcaccctcatctccgtcgtttgtctttaaaaccttttgccattaccatcttcgcacgttgaatatacgtcgactttaaacatcttccaatctctgaaagcccctctcttttctccatttcgtgcttcatcatattcgtcgtcgcttcggtaggttcttcttcatctctcttcgattggattggattggattctatttgagtaaatttgttgttggttcgttgatcgcgtatgtcaacggattatttagggttccaccaatttttcgattcatctgtgctagtcttctggaatttgaaaaatgggaattggatgggtttgaaattggaattctagtttctcccgtattgatttttgctggcaattatgctgatctagattgttt

SEQ ID NO: 50887 - DNA, 431 bp, Arabidopsis thaliana columbia
atttgctcgtttatacgatagaaggatgctcccaccgttggcatcaagtcggaaaaggatgcctccacctccgtgtgtcaattacttctgtcccatgcatctttctgaacgtgttagtttagcctgattgatattaagatactctactagttcttagttccgcaatgctcgtttcttcgtcaaagtgtttcccaagcgcactgtctgctacatcgtaaattatttcaggggcgaacaaatttgcacctaacacatgttactttcagtcctaatggcgaagaagttttgctcagttacagtggggagcatgtctacctgatgaatgtaaataatggtatttgcagttgagttgtttgctgcttaaagctgaaattccgtgaatagttaatcgtgcagtatgaacttgaatttgttaagaaaaataattgaac

SEQ ID NO: 50888 - DNA, 1030 bp, Arabidopsis thaliana columbia
tttccaaattggtcacattcaactctttctcttttgtatcgaaactcgtgggaacttcacggtgaaactggaacgacagctctcaggatatttttcagggctttcagacactgagatgggacctatctcaggacatgtatagctagaaaggttaggaagcacagaggagcattggtagaatatagtgacgctcttgtaggtccgtgaaagctcgaaagtttcgggaggcaaggttgtgtttgtgaatacagaggagcaaaaagaacctagaaggttctgtttggcaagtgtaagagtgttagatgtttgatctatacggagaacagagtacttttggtttgagatgaataaagaggtgatgttgtttttgttgcagtgaagctccagcgagtggatgaccgcattctttatgacgattcccaccgagacggtgaaccagcggtgatgtttccgcactgaaacaaagtctcacaccagccaagtccttgattacttgaatcacaaggaagagggtgaaataaggagaggaggaagaatataactagacaagaagtgggaagatgatacatgattagttcggttcatgaaaaatgtgtcttcttagtttggtttgtgttgagagaagcagagtaaatgaattagtgagatacagagagagaaagagagacaagaagcctcaggaccatgtcaagtgggagactgtcctgaggaccatgtcaagtgggggagacagaagcgtagacatgtgatgatgtcaagtttacttttgaaatttctttgtttttttctccaagttaaaattttgaaatgtctctctaataagcactaaaaattctctatacggtcctaccacgtagttgatgaggtctcagcattgttcgaactggatatgattatgggaacactattaattgttctatcttaacacaatttttccttgcagttaaccaatgtggagtgaaaaacatcttgtaaacacacccaaagaaggtgtccatggaacacaagattcaatctttgatgtgcataa

SEQ ID NO: 50889 - DNA, 104 bp, Arabidopsis thaliana columbia
tcaaaaatcttaacttccgtagagaaatcgccatctcgatataaacgtccaccatgttggcctttttcatcacctgcaactgcaacgctttcctctaccgtttc

SEQ ID NO: 50890 - DNA, 522 bp, Arabidopsis thaliana columbia
gttgctgattcctcgtgttcttgattgcttacctcaaaggattgatcacaaaagccttttgcttgctcttcaaatggcggctgaaccgataatccgtatttccgacttggatacaacagtctaggcgctttcgctaccattaaccatcttcactttcaggtaaacagaatcaaatagttcgaaatttgtttataaccaatcggttttaatttgttatgaattctcgaaatcgaataaagcaacatgaactgaaccaaataactgaatgctctcacctttatactagtgtgatatttatggagattctacttggaacaggcttactatttggcaatgcaattcccgatagagaaagcttcttccttgaagatcactaccaccaataatggcgtcaaaatctctaaactcttgaattaccctgtgagaggtcttctagttgaaggtggaacaccattaaagatctcgcagatactgtatcagacgcatccgtttgtcttcagaaccacaacattcctttcaaca

SEQ ID NO: 50891 - DNA, 469 bp, Arabidopsis thaliana columbia
ggacaagataaatattcggtcaaatatctaagaacgaggcccaaaatttcgactcgattcaactttcaaattcccacatgttctttgattgtatgattcgaatatatgattattggtcccattatgaaaattctcattgaaaaagaaggaagaattagagactctttgcaataagatataaataggcatgcagtgttagtgttgtttgtatgatgacagagcgagaagaagaaagtcaaatgtccacatgagttccctttaacgcttcattgttgaatactcaaagccacattggtttgtatataacactgaagtgtttggggggactattggtgtcattctggcgttgaagtggccaccattgctgcggttttctattatcttttaaatcattagtaagctctttttagttaattccaaatgttttcatgaattttgtatttatcatggattcatggtgttgacctgt

SEQ ID NO: 50892 - DNA, 568 bp, Arabidopsis thaliana columbia
tttgctttagttggaatgtgacaataagatttctcatttccctctgttgttatgcagcctattgtgttgttgttattgaatctgctgggaggcagataccaatggctttcttggagagagtcaaggaggatttcaacaagagatacggtgcgtggaaaaagcttccactgctaaagccaacagcttgaacaaagaattcgggtacttttaacatttttagtcagagcatttcttttcaattccatctttgtggatgtgtgttttaaatggttttgttgtaatgaatgtaggtctaaattgaaggagcacatgcagtactgtgcggatcatcctgaggagattagcaaactttccaaagttaaggctcaggtgactgaagtgaagggtgttatgatggagaatattgagaaggttagactaaattatccatgtttttcatcgacaactcctcaccttgtaagctgaatgtgttttctgcaattcaatcctatggcaggtccttgaccgtggagagaaaatcgagctattagtagacaagactgagaccttcgctcacaggttaataata

SEQ ID NO: 50893 - DNA, 552 bp, Arabidopsis thaliana columbia
atgaaagtttgtgtaacgtataaacagcttatggaattggagcaaatctgcattttgaaacccgatgatgaggaagaaatggagtcaccatcaccatcgaaaacagaggaaaatttaggcgtggttcctctgtcttgcgcgtttacgagacaagaacattgcgtttccgagacgaaagaacgcgaagaatcgactagaagactaagcagccttatttttctttacctcatcgttatgtccgtacagattgtgggaggttttaaggcgaatagtcttgcggttatgacagatgctgcgcatttgttgtcggatgtggcgggtttgtgtgtctatttgttggcgatcaaggtctcgagctgggaagctaatccgcgaaactcgttcgggtttaaacggcttgaagttttagcggcgttcttgtctgttcagctcatatggcttgtctctggagtgataatccatgataccattcaaagactacttagcagaagcagagaggctaatggagattcatgtttgggaattcggctttcgggtttttcatgaacttgg

SEQ ID NO: 50894 - DNA, 615 bp, Arabidopsis thaliana columbia
tctccaaagcacttcgatatgggacttagtccacgaagagttaaccatagctaaatgagtacatgacccaaccatcccatacatccagctaaaagctctgtaatagactaatttgcaagtagataaccaattgctacacaaaaaaagcaacaaacatcattacactaaacaaagaaatagaaacttttcacttttgaaaaacaccaaataagcaaggagataaccaaaacctcttagcaatggaagcatcattgttatacatagagttcctctgacgaacacgagaaatcatatccaaactaatagttggataatgagtatagcaaacaactttgcaaccaaagatccgagcaagaggatatgtaaacgcatatccactagtgtcaaggaaatacaaaggagtgaacatgcgtaatgcttcccacgctaagtaaaccgaaccaagactctgacctatcattgtaaaatgtgggtaagtactctcttcaatccatttccttttgtttagatgaatccctaaagcccacaacaacaaccaacaaaagcacaaaacttgcatcaaaactaaccaaattgcaaaattgaacttgcctcaaatctgagaggtctgtgtta

SEQ ID NO: 50895 - DNA, 862 bp, Arabidopsis thaliana columbia
aacacttgtaacataagactgcgggtatgagctgaaatttggtagaggaaaagcagtttgttcctcgacggaagaccagattggtaggcgagatacttcccctagacgttgcctgacttttgatataaggacgtcatagacaagttcattgactgtgtcggcaaatgcagcaactctctgagacgccaaaggcagtgcgtggaatcgtggatctttggactgcaaaaaatcaaagggaaaagggaatcgatacgcatgaaatatcaaatagttaattcagaaactttgtaaatcaagcctacaggttttcactacctgctccaataggtttaatagtttgtgagccttctccggaacatcaaccaaccgaatagctgccacatccatggaagctcgtccagccatagacaaatctccagcagtttgttcacttttcaaatgtgataggttgtgatccaaatttgtgccaaataatgaaatagacaagctggagtttagtctagctagagttgctctcaaagaggcttcaaagacagaagacctgctcgtgagacaatcagctacagtaagaatttgaagtgctccttgaacaatggaccattcctcatttgaagtcaaatccatcttgcgagacgtctcccttttctctgcacttgcatctttctttgagccaactccatcacctgtaccatccactccacacacaactctcaaagatttgagtgtttcttgaagcatagagatatactgcaacattatgtcatctaatgcaagtatcagctcgtctgcctctgaccctccagtaaagccaatacacctttcaactgcagcttcaagaagaacaacaacttggggaatagac

SEQ ID NO: 50896 - DNA, 482 bp, Arabidopsis thaliana columbia
gatcagttgattcattaaggtatctgagaaacttctggaaggaaaggagctggagttcaataggtgggaaggggatgcacaagacttgcttaaaggcgtccgtgagaagcttaacgtgcttggggaggtcagattgtcaatgaaaattataactcttcattccaccagttgctaaaatctgatgttttggtgatgcttttgggaaatgaagcactggagtcgggacgagaagaccaaatgcttgaaggaaacggcaaaggcatttaagtatatggggcagatagttcgcttgatcatcttgtaaatatctaggttttaaagttaacagtttccggcaccagacctgtgttcactacggtaagtctggaatagtttcaaaactttcattgtcaactgtctcttcactgtaaatcaaatctcccctgcagattgcattgcgccaatatgcataccgcaagcattgtggtctcgctaattcaggg

SEQ ID NO: 50897 - DNA, 562 bp, Arabidopsis thaliana columbia
tgataggctcgactttgtgttttgcttgaagctaccttgtttggacaactatggaggttagaaccactgcctacagagaagaaagagatgtggagaagagaaatggaatggcttctctgtgtcagtgatcacattgtagagatgactcctacttggcaaacatttcctgatggaaccaaacttgaggtacagattaggcattgatattgattgcattgttgttgtttcgattatagacccatatattttgtttttccattgttgtagataatgacttgcagaccaagatcagatctttatgttaacctcccagctctcaggaaactagataacatgcttcttgtaagaacaagtgatctcttttcgtcttcccagtttctctataggtattttaagcagcaaaggtctcattcttattcatcttccatctttgcaggagatattagatagttttgaggagacagagttttggtatgttgccaaggaatcatggcacacgaatcagcagcggacggatcatcttctttccgaaaatcttttcagagacaagaagacaaatggt

SEQ ID NO: 50898 - DNA, 678 bp, Arabidopsis thaliana columbia
tatcctttgggtcgttcttcgtgacccaggtgtcgccaccggcttggaccagtagatgtggatccagatcggaagtggatccggtttcggagcgtcttcgctgcgacaatcaatggcttcgtcgacgccatttttgtgattccgatttcactctcagtgatatattgatgattagacgtaaataaactctagtgtgagaaaacctacaattacttgttgaaaacggtgtcgttggagaactcgtgctcacacaattcacaacgtagtcattttggagaaaacaaaaaccaaatttccaattctctcacaaagaaatataagaatccaaaatctctttactaagcaaaagcaatgttgttttcaccaaccataacgtaatcagactcaaacaatttcgtgtaaagaccagaagtgaaaccaacaaacgagacattattcacagtggaaggtctaaattcgagaggaacattccaagcagcattcacatcatcatcatctgaccatttcaggtcaacattctcaacgcgaaacccgttcacatgctccataatgattccagacgtggctctatggttcactagaccttgacatccaggtctatagtccacaagccctgcactgtaattactcatcttctgaaagtaaggttcatgttcttgaactttatatctgagagta

SEQ ID NO: 50899 - DNA, 541 bp, Arabidopsis thaliana columbia
tctgatttcgacgattgaagatgtagtaaccacactaaatcgagaaggtttttggttaaatgttcagcacgatgcgttctatgagcaacagaatctgagcatgagcagttttctgttatcagtttcaagaactgtttccattgacttcatatcttcccctgaagtgaacttctttaagaaaattactggcagttttgggcgtaacggaccgacttttgtgttccagtttcttgggaaagaagatttcgagccgacaacaaaccgaacatacggttctatcttgagtaacctaacctttgtcaagacgtttgcttcagggattcttgttccaaagtcttacatattgccacttgatgacgaacagtacttggttccacatacatccttagttcaagatgctcacaaagcaggattacaagtatatgtttcaggtttcgcaaatgacgttgatattgcatataactacagttccgatccagtgtccgagtatctatcttttgtggacaatggagattctctgtcgatggtgtgcctctgattt

SEQ ID NO: 50900 - DNA, 649 bp, Arabidopsis thaliana
ccagtgtgctctaaaggcctcgcagtgactttgacggcactccgatgcgtatcatgaaagatagcgccgccattccccatgagcacgtcatagtggagtattggggccaggcagttcttgaaggtgactacgcaaacatatgtacgattttcagccgaatcacaattgcgcatacaagtagctgatgatggtcacagccccgacgaacacagaccgcatgccaaacacgacatataaatccgtccgcctcctgagcgagaagtacaatctcttctatgctgtctggtgcactggtgaccacgagctttttgatctaaatgtacatcgtcttcccattttcgtcaagctgcgaaagaagcgaataactgacggttaatacagacggacccctaccaaatgcacaacatctacaataccgcctctcgatctttcaagaacaggctagacgccctcctcctcgtcctgaagtcctgcgccggaagcacatgcatcaagccctgggccgaacttcaccctgacggatcggttcagagcctttctgacgctttggattcgcaatatgatgggttctatgcccagcttcctaaggttgagtatgaggcttgcgtagacgggtatccattgctgcagaggggttgcagtgggaaga

SEQ ID NO: 50901 - DNA, 576 bp, Arabidopsis thaliana columbia
  unsure (1)..(576): unsure at all n locations
nnnnnnnnnnnnnnnnnnnnnnctaaagattgctgtacgccacaccgctgatgctggtactgattctggtggaattgagcgacgtgattttcgccgtggatagcattccggctatcttcgccgtgaccactgacccgttcattgtgctgacctcaaacctgtttgcgatcctcggcctgcgtgcgatgtatttcctgctggcgggcgtacagagcgtttctcgatgctcaaatatggcctggcggtgattctggtgtttatcggtatcaagatgctgattgtcgacttctaccatattccaatcgccgtctcgctgggcgtggtgtttggcattctggtgatgacgtttattatcaacgcctgggtgaattatcggcatgataagcagcggggtggataatttttaatctgcctaagccgtgtaccctgtcattaacatgagcaccgttttctccctctcccttccagggagagggtcggggtgagggtaatttttcgcaccgatgctggcctgtcccctcaccctaaccctctccccaaacggggcgaggggactgaccgagtccttttctgatg

SEQ ID NO: 50902 - DNA, 596 bp, Arabidopsis thaliana
aaaagaggaagatgcagaagacgtggagagactagaggaggaggtggaagaagaggaagacgatgaggatgaatacgataagactgtaaaggaagtacacgcaagtggagaagtgagaataagttgatattttggtttttggtctgtgtaagaaagaagtcgtcgttggtttgttgaaactgaaaagtctctgttctcgtgtttgcctttacaatgctttggctaaggttttggttctggttttggagatttgtaaaatttgcagtataagatgaacaaacagagaggttgatgatgagaatgagtcctttgctacgcatggtactatgaacattgtgacctccaataaatatttttgtaaattagattttattttccgaaaagattcatgtatttgatttttggatttcttatttttattttttttcgttccttatcatttttttgaaaatgcaaatctataaaatacaaatgtcaacaaaaaatcaaattgaaatgttcggaattcaaaaataattgttttcttttgtttttttgtttctgatgcgaaatgtgaatatattagagggaaaatatcccgccattaggaaaccgga

SEQ ID NO: 50903 - DNA, 754 bp, Arabidopsis thaliana columbia
gtgtttatgtgagtagttaagtagctggaatccttatacaacattttttttgcgcagggcaagtaggcttgggagagaacatcatgacgatctggcacagtttatgctagggatgggatacgcaacagaagctcttcatttgcctggaatatctaagaggtaaataaaacatataatattttggtgccgcttttccttcaatttggttctactatagacagttttttctagtctctgaattgcttatgctggacagtaaacagaattcagtatttcactcatgtattgaatccttcatcctagcgttcaactcaaccaaaatggcatcagagatttttttttcactttgacttaggttccgagtttgacttaactttatgttttctcaggctggagtttgacctagcaatgcagagcaatgatcttaagagggcacttcattgtcttctcacaatgagtaatagcaaggacattggacaggacggtgtaggccttgatttgagtgacattctctctttgacagctactaaaaaagaagatgttgttgaagctgtggaaggaatagtgaaatttgcaaaggagtttcttgaccttatagatgctgcagatgccacagggcacgccgacattgctcgcgacgtctcaaaagactggcaactgcaggttcggtcaaaggcgctttacagggtcatgagttgcgaggcctttcattacgcctagcaaaccatggagaattgacacgcctaagtgtatg

SEQ ID NO: 50904 - DNA, 1236 bp, Arabidopsis thaliana
tcgaactctctcgtccagccatcgggtctcctctctcagtcttcgcggtgaatctagaagagcttaataaccatagtcttcccctccttatccatcacacgcaagagattagtcccttcctcgtgcctagccgaagggaccagatcgttaaggccttccacaacttcgagaagactaatcaggagaccgtgttgatagagtgcttcacggcagtggcaccgcgaaagacgatgcacgaggacgtgtgtgcgattgcctttgaccaggaaacagatattgtgatcctaactcttgatgccgggatcgagttatgggagaggctcctgtgtcgtaatctcctgcacaactgtccctgctctgttgcgcttttcatagacagaggaaggctcccagatttcaggttcgttccactgaaaaagcttaccatcaatattggtgctatcttcttaggaggaccagatgaccgtgaaatgcttgcgtatgaacacgcttagccagccatccaagcgtcgagctccaagtcttccggctcgtggaccagaacggcgtctctccgctcagagacatggtcgagaggaatcacgacatgagagtcatcaacgtcttccgcaaagaaaattccgagaaaaacatcatcttcagagaggtaatgagaactattttgccttggattggaagctatcttatttccccttagacgaaaccttctctatgcaacagaggtttctattcggtttagaaagtatcttgtgtagacgaaacagaggtttttctttatctaacctatcataatgtgttcccctgtttctaacattcttaaaggtaagaatagaggaagcagtgaatctactggatctactaaggaaggaaggggacgacttcgatctgatgatggtcgggataagacacgaagaaaatcttttgatgttggaaggattgtcagaatggagcgatatgaaggagttaggagaggttggagatgtgttgatctccaaagatctcgagctctctgtttcggttctcgccgtacagcaatgagattggtgaccgtttatctcgttttcgttccccgagtttatggatttgtacagccttttgtagaatattgaatacaaatttttttctaaaaaagttctaccattcaagaagatatcttgtttacttatatctttcaaatcattccagagcatgtgatcaccaatgaaatttcaacagagattaacagattaatttcag

SEQ ID NO: 50905 - DNA, 1256 bp, Arabidopsis thaliana
atattatctgaagcgtattacatactaaaaatgtgaaacttagagaacaagtttaaaattatagagaactacttagttaacaagaactttctataataagacatcgttttaggctctaacatttctttactttttccatgataagtaattggacaatgaaatgtctcctaagattctattatacagtcaaacattaagtgatttattaagactaatgaaatgctttggatatggtctttataagttctctgacgcttagttttttttattaatattaaacatgtgaaacttagagaacaagcttgaacttatccagaactacttagttaacaaggactttagctcgaatcctttataaacttccaagaactttctttaatacgacatcggttttggctctaacatttctttactttctccatgaaaagtaatgtgacaagtctcctaagattcgattatacagtcaaacaaaaagtgttttattaagacttatgttaattaattacctacttaacctctaaaggttggaccaattgctgaagctgatgaaccacatgtgacatccttggacgcattgatggcccattctgagtacaagaataaaccaagtcaacaactttctgaaccacacatgcttccggtaaaccgcatgtaataaccggatcaagaatctctaaccaacggttagcttgaaccaatggtgttgcccattcgaatatgctctgccacccaactgaagaattaacagcctgagttggtctacgaccgctcacaatctcaagcaaaaggactccgaaactgtagacatcgctcttcgtggttagctcgtttctgtaaacgtattcgggtgcgaggtaaccgtaggttccacccgccattacggttctctcttgcattacttcccaaggaacgaattttgagagaccaacacccattaaatgagctccaaactcctcatcaagtagcacgttgctagctcggatgtcgcggtgcaccacttgtggcttgaccttgtcgtgtagaaacctgtttttttttacgttttaaataagtttgaggtcaaaagaaactcaagtatataagattggacttacgcgattccttgagcaagagttgtggcgatgttcaatctcatgttccagtccaagcttctaccacctctaggcacatggtgtagccatctatcgagaggtccactagctatgaactcataaacaatgaaacgttctccatgatcatagcaacaaccttttata

SEQ ID NO: 50906 - DNA, 528 bp, Arabidopsis thaliana
ttatttacctctttgccccattcagtcttctcttcataaccacagctaataacatgaatagcttctttgatcaacgagctcgtgttcgtcgcctccggaatcctccgttctccatcaacgtcgacgcaataaacacaggagacattccaaatctcttctcaaaattcttctgcgacattaacgaagatttctcaagctcatcatatccttcaagcccttcctcaatatcttccaaatcaaaaatcgcctccgtcgatgatcgttttctactatagctgctcatcgttttatcatcactcttcttcttagtcttcttctttagtttcgagaacaagctcttgattcctgatttcttctttgacgaatctgatttgtgattacaggttacctccgccgcaacaacagcagatccacgacgtgcaacaatcacatgtcattttctttcgtttttccgataccggagttcgtatccgtataatgctggtctattgaatacacatcctgttcctacatagactggtccttgga

SEQ ID NO: 50907 - DNA, 282 bp, Arabidopsis thaliana columbia
aaggggctaatacctaaaatatataataaggaactcacaaatttcaatagcaaaaaaaccccaaataattcaattaacaaatgggcaaaggatctgaatacacatttttccaaagacataaaaatggccaacaggtttatgaaaagatgctcaacattactaatcatcagggaaatgcaaatttaagccacaatgagatatcaccttacacctgtcagaatggctactatcaaaagtcaaaagcgattagacagtggtgaggatggagagaaagggaaccct

SEQ ID NO: 50908 - DNA, 503 bp, Arabidopsis thaliana
  unsure (1)..(503): unsure at all n locations
gtgtgctctaaaggcacacggctgaagcggctaaaagagatcaatcagccgggctacagctactggtacgaatgcacttcgcgccattttactctggctctcacgccgctcagcgtggcggataaattcaaagagttaatggcgcaaaaacccggtagctggatcttcacctcagcaacgctgtcggtgaacgacgatctgcatcatttcacctcgcggcttggcatcgaacaggccgagtcgttgctgttgcccagcccatttgattacagccgccacgtntgacatctgtgtgctgcgcaatctgccgcaaaccaaccagccaggttctgctcgccagttagcggcaatgctgcgaccgatcatcgaagctaacaacggtcgttgttttatgctttgtacctcgcacgccatgatgcgcgatctggccgagcagttccgcgctaccatgacgcttcctgtattgttgcagggggaaacagcaaagggcaactgttgcagca

SEQ ID NO: 50909 - DNA, 484 bp, Arabidopsis thaliana columbia
tatcttcttgattcaggatgcttcctcatttacagtctaagcaacacttccagaatttagttattacgagaagtgagttacatgttttgtagatttagaaggagtttttgcagtttcataccaatcaagtttttatagttaaggaatttagtttcttctactttgatcgttgttcttttgtgccaatttaacttgaactaagaaaatcaaggaactacaaaaattacataagaaatctcacacggtcgaagcatgccaaaaaaaaacagcttggaccgacgcagagattaacactaattaacatcaaagtagatacacttatttgatattaacataacaaacccccttaataataataaaatctctgcaatgaccaaaaactccatcgcagagagctctaaagtccctaaaatacccctatggcaacatctaatttacaagactcgaacactgaagaatcgaatccaatcgatctcgtacgacg

SEQ ID NO: 50910 - DNA, 566 bp, Arabidopsis thaliana columbia
tttttttttgttttggacaaatgcaagtcctgatcaaacaatgaattacgttagattactaatccgacaagagcaaaacaatgatcagtcacgtgaacaaagatttttagtgtacggacggccccgttgcaactccaatttgggctcttgggcttttcgtgtcatctatattgaaagttttttgaaaagacaatgacccaaaagccagcgcatctctgtccaccccatctggacctgacttgtgtacgaatgtaatatgacgaattataattcgatgtatcaagatgaattaagacgagcgtcaaatcatgatgatcactaaggttgaatgaactgaatctatagtgtgtgacaaccaatgaaactccgagagcatattgattttcgcgacattcacacaaatgaaacggctgtgatactatcatactactttagaaatgttatgttatttatttttatttaaaaacagagtattcacaggttctacaaaacgttcataaacttaaccggttttacaaactattaagtcgagtaaccatatgtataatcagtagttcctatgtgta

SEQ ID NO: 50911 - DNA, 270 bp, Arabidopsis thaliana columbia
ctctttaaaccatgtccctctgtaaccatcaaaaacgttacagattcagtattataaaaaaaaccgaaaacattccacaaaatgatgtaaatatagttgaattattcaaaaaaattcacctgaattttccaagcgaatttaacttcgttgctaatgtccacgtagatactgaagtctagtaagtatcttaatcgctcatcaaaccttcacaagtagatacatattattatccccccctccccgtcccacccctatcgccttccttcttcg

SEQ ID NO: 50912 - DNA, 1388 bp, Arabidopsis thaliana
ctcctcctctttctactcccggggatttaaccttacccgggaaactttcacccgtgactcttccagtttcattatttaccccaaaactcatcattccccacatccacgactcaacgattccctgactgaccccagttatgctgatgatgcaaatgaaactgatgctgatgatgctgatgtgactcggatgttgcagctctacccctccccccgaccgactcaacccacccagagatgcatgcagactttactaaaaagcaaaaggaattttctttcttataggcaaaagaagagccttcaaacagatatggcacgggttatggcatgcttcgcccattcggctgcttctttaattgtgtggtcttcagaagacaaacattcgtttaagaactctttacttgacactgactgttgtatcaaaccacccacatgactccctagtgtatctgctaaatctcctaagaccccaatcgctgtcttcatcaccacctcgtccctgtcccaaggcaattttaccacaaaattaaacaactgctatgacataatagaaattcagttgggtcgtaaccaaacttacatgtctttctccatgtatatactgtccaaaaactggaggatatggggtgcgaaaggaatcaggagctgggttttggcggagttcttgaaaccttgaaatatgcctgaataagcctcaaggattccgtttctcaatgagtttgtgtactccgtcatttcatcatcagctccagccgagtgagcagataactctgcggcactctgaagcatcggcattgaatacctccagtacttatcaaaatcctcaccgatagcaagtgctatgtcaccaaaacaggagaatatcggtggcttcactgatcggtgcaattggttgctcgacaaatctttcagaagctgtgtcataatcccatcgcaataaggtaaaatcttgtcctccaatgctctgcagacatccccaacaacaccaacagtaacagcacacacttggtattcttcaaagttttgaagacccatcttcaaagtacttataaaactcaggcatgtatttggcaaaattgggacctgctgcataagcaagagcaccaatggcaagcatggcttcctcatgtgcagttgcacttctacaaccaaacaccctcaggaaaagtcccatcatttggtctgcatactccatgaacttagacttggttggttcagatcctaatttctgtatgatgacctgcaagcatccacatagaagtccctgcaactcgttttgtttctcctctcatccaatgaaagcttttcccttccaaagtattgtgaagcccatcattatcactggtactaattgcagaaccatggtagacgtttcatcagttgaacactga

SEQ ID NO: 50913 - DNA, 479 bp, Arabidopsis thaliana columbia
ccttggcgcatacaccacgcgcagattcgactcatcaacaatcagctctgaatggtcgtatttcttctctgacttaatcagcgagaaatcatcaggaatataagggttaagctctggcaaagagagcgcaatgtcggcggcttttttctgccagtcggcgaaagtttgtgcgcctaatttatcgacctgatacggcgcatcgaccaaagtaagccgttttgttgtgcggctctttcgggctgatataccagatacgcgcattctgcggcgtcatcatcgccagacgttcctttactgctttagcatcgtaccgatcggcaatattgactgcatccagcgtatgctcaacaggaacgcgaatcatggtatctgccagccattcgacgtaatccatatcacgggtgatcgacggataacggaagtcgatatccagcacattcgccagttcatcgaagtattgtttatcaatgcctttttca

SEQ ID NO: 50914 - DNA, 502 bp, Arabidopsis thaliana columbia
gttatttagccagattccataagagaggaatttgatcaggtttttgatatgtggctactattgtatgttttactatcaattgctgagatatgtcttcttcgagttctacaggtggaaaatgcacacagcaggtagaacttagtggagagaatataaacatcacctacaaacctgacgggacacatgtagctgttggtaatagggtattgtctcgagccccatatctttacactttcattgttcttactgtctatggattacttgatagatcccttttcatagtcgttgtcctttctcttactggccaatgtaggatgatgagcttacaattctggatgtccgtaagtttaaacctctacacaggcgcaaattcaattatgaggtaacgtaagctcagactcatgttaatctttattaatggctttttttttataaggctcttccgtatctcctgtttcaagctcatgcggttatatgtcactaagttccttgttcatgtaat

SEQ ID NO: 50915 - DNA, 536 bp, Arabidopsis thaliana columbia
tgcaccccagacgacaacttctttacctttgttcctatttgatggtggatgctctatgaagtcatcatcgccattgtcttctcctttctctgctgttttactatcacctttattgcccatatcttcaatcttatctccatcaaagtcatcatcttcttccccacttttttgactataaacagaagatccatcagagctgtcctcatcgtctttacagttttcagtccctttatcctgtccatcaaacaaattctccacagcttccaattctctgcctcctaaaagttgcagctccacagcttgtacgtgctccagcaggatatcatcattaatctcactttgtttcccatcttctcctaacaaagcagcttccacctcttctacatgtgttactaaatcttcgtcatttatttcccaaatttctgaaaccgtccttttgctacctctgccttcctcctcatctattgtcttcgctctctcgacaactgcagacattaggcttcaaagtaccaacatcccaaacctctcgacgaaga

SEQ ID NO: 50916 - DNA, 603 bp, Arabidopsis thaliana columbia
tcaacttttttaatttctcgagtactaaaatgcaagaaatatatatacaatgtgctaccattgtatacatatctataaatccttcactgattaatgcatcttaatgcatgcatacacatattttatctgtctatgcatgtttttacggcattttctaatttgtatattaaatatggtacttaagaaaagaaacattaacatttattttttaaactgcatagaacagatagaagacgataattttacaaacaaagtcataatcttgatcaaaccctagacacaacataaataaatataatctttaaactattgttatatagtactggcaaaaataatcagaacttgggcaataaaggacatgaaatcttgggaagctagcataattagaataaagaggtaattaatcaacttggggtactaaataatgaaacacaatagcactccataatttatgtttcgtgtttctcttagttagcgagtacattatataattgtgtccttgatgaatttcatgcttgaaatcttgtgcaaagaaaccacttaatttagccccataacaaagtcgatcggaacgaaatcctaaacccaaatgttgttgtgcag

SEQ ID NO: 50917 - DNA, 609 bp, Arabidopsis thaliana columbia
catgttgcttttattttagctgggattaaagtagttaattaggactacttcattacttcactattatcttcttcacacgcatctttcatctacaatgtatttctattatcaatcatccctacgactcatacatacactgacgagctaagttaacatggccaattggtttttaaaacctaaatattatatactaacattttgcaaaaatggcagtagaatataagaaaatagaaaatggtacaagaatcttatatattcaaaggagcaatgaaattaagaacatgccttttgaggaatctgacaaattagaccattgtttttctttcacaatttaatggaaaaattattgtgcctcacatgtcctagcattaatggtataaatgaattttgactgaaaaagctgcaaactgagtaaattctcaaatctaaatgcatctttatgcaatttatttaatttaagaatggattatatcagaatctttattattaattacttcatactcaaaatttcatcttttcttcgttagactacagcttattcagcttaaaaaaaacactaattcccaagaaaacaaaagatactcgtaaccctagaacaagggcaaaaag

SEQ ID NO: 50918 - DNA, 567 bp, Arabidopsis thaliana columbia
tttggcgtctgtaaccatgacaagtgaggttctgttttttcaagatggcagtgggttggaggtaatagagaaaactccctccaactgatctctactctccttagtgaaaagaatgcatagaatgtgatgagaggatcagttcaaccaattatcccacacagagaattttcaatctttctagggaagcctcagtagacaattaatgttaatcagaattcccaaatcttttccacccagactcctaaagatggctagaattcatctagaattcatgtgaaaccctgccttcttattccatctggacatggttttcttccagctgaaacttcccagagccccttaagacctgccttcactttctagagtgagtttagaaacttcagaactatgaaaacagaggtcagcaaactatgcccccatggaccaaatccaaccagcttcctgtttttgtaaataaagttttactgaaacaaagcaatgccacctgcctttttttttgttttgtttccagcaaattgtccatggctattttcatactcaatggcaatgttgagtattgcagcagag

SEQ ID NO: 50919 - DNA, 482 bp, Arabidopsis thaliana columbia
agatcatatcaaatatatatctagataaagatataaagaatggttatatatttatatgtataaaaatagaaaaaatctttcttaaaaaaaaattaaaaaacttttaaaatttaattattgtgttaattgaaatatcaggacactgtgaagtatgcgttgaataagcaagagaaagaatggtcacagctttgtaattctcagttcgggtatcagcttgagcacggtcgagaagtagctttttcggtccagttcgctcattacatgttagtgacggcgaaaaagcacgagatttggatggattttggtgaagcgcctatcagattttcaattcaagagttctcggttgcaatgtttgcggatcatgcatccagcctaaacccaatagatgtcccaagggaattgatatgggacctacctcgaagaactgtcttctttggtacctctatacctacgatattcaaaggtataagatctttattggt

SEQ ID NO: 50920 - DNA, 497 bp, Arabidopsis thaliana columbia
ccaatgttactgaagaatcgtttataatttggaataaaggtttcaacttttttagaggaaatgtgtgcgtttactcaattgatgaatcatagatagacccgaattgatgtttagattggttactttgttttgtgtagattgaggcacagaggtcctgattggagtggactccactgttatgaagattgttatcttgcccatgagcgtttagccatcattgaccctacttcaggagaccaacctctctataacgaagacaagaccgtcgctgtcactgtactttctcttgtctttcaaacaatgtcaattagtatcatgtgtaaataaatgtgtcaaagtgttggcctttgttccttgctggtcatctgaagggtaaagtaaatttgcttatgatgtccgggtcatggagtgatatacttccacaagattttgcgtgaaaagcgtaagtctcatcagttccgtacaggtagtgactgtgaagtgattgcacatcttgt

SEQ ID NO: 50921 - DNA, 588 bp, Arabidopsis thaliana columbia
cacgtatttttaatttaattttgttcttttttaaaaaaaatctggcatacttgtgaaactgaaaccacatgacacatgtgctccctaaacgtcgccgtgaccagatagctccggtcagagtcattatctctctctcgctcgctctctccatcttcatctctcttgctgaaaaatggcgaactcgagaactgtcttaatcttgtgcggtgactacatggaagactacgaggtcatcttcttcctctgctactgaacttttttttttctttttcttaataccatttcttccttgttcttatatatatatcagctgattagtgtgtggcgtcttctctcaggtgatggttccgttccaagctttacaagctttcggaatcaccgtccacaccgtctgccccggaaagaaagctggtgactcttgcccttccgccgttcacgatttttgtggccaccaggtttctctctccctctctagatctccatgtgtagctgcttgatctattgatatacgatccattgtaactatatttagaaatggttcattccaattgagcttcgaattggatgatagaatgtattgtagacaag

SEQ ID NO: 50922 - DNA, 583 bp, Arabidopsis thaliana columbia
  unsure (1)..(583): unsure at all n locations
cgctggcatagagaggcatgaaagtagacttcctcttttgtatgcatcagacgaaaagaaaaccaatggagacctagaatttataatggctgaatttgcaggtaattttcttaagttgtatatttaggaagactgttcatattgtaagcacatatatgatcatgtttttgcttgttgcatatgattacttcagaagtctctggacgtggaaaggaaaacggaaatcttgatactgcgccaagatattccagcaagacgatgactaagaaggttatggctattgagagagtcgcatctacgtgtgggattgcatctcagacagcatctggtgttctgtcaggttcgggtgttttaaatgctagacctggaagtaccacatcatctggtttacttgcccatgcgctgagtgcagatgtctcaatggattacttggagaaagtggctgatctgcttcttgaatttgcccgagctgaaacgacagtaaaatcatacatgtgcagccaaagtttactcagtcgtcttttccagatgttcaactgtgtggaactcctattcctgtanaggtacttaaaatatatttttt

SEQ ID NO: 50923 - DNA, 573 bp, Arabidopsis thaliana columbia
gaggattgttgcacctgtgcttcttatattagatctgatcatcaaattgtatcacatcaaacaaaacacaaaaaggatgaaagctaaatctactcactgctcgagaccgtagtcttgaaatggctgatacgctgcgaaaaaacaccattctttcaaacctcacaacactgatcggttacgaatccaaacaatcaagattggcttaaccagataagagataaagggaaagagaaagcgtggagaagaactaacgggaaattcgaaagtttcttcaacgtagagagaaaaattgagagatgttgagatatatctgcaacgtgatgaacaagcgtcaaattacaacatatgtaaaccaaacacacggattcttcttaccaaaccggtataatgaaccaattgattaccatttagaaaaccaaacgaacaggttatgttcgggttcggttgagattggttagttccgtcggtccgtgagacgcaagattcgaagcagccgtaacgattctaatgcctaaaaaaacggtcattaataaataaagaacacatggtatgtagcttttgctgttgctaaat

SEQ ID NO: 50924 - DNA, 556 bp, Arabidopsis thaliana columbia
atcccagataggccgaaatctgaaactttggctgtccatgtggcgtccaaaagtatgtttgatgactttatgtcacggtggatcaccggaggcacgataaactcatgaaggtattggatcccacgagcagcgtcaagcgcgatcatcaagcgtgtttgccacgaaagagggtcaaattgaggattgtgaaggtgatcggctagagatccatttttcatgtactcgtacaccaaaatcctctcttctgtgtcctcatagaaacccagaagtcgaacaagatttttgtggttaagccgcgacatagactctagctcgttcacgaacgctgaatccttatctgctcgtcggtgtctcatcgttgtcccagacaatgtaggatttgttagctcagctcgtttgattgcgacatgacgtccatccgacaaaacaccttgataaacagagccgaagctgcctataccaagatgaaaccggacagagaaaccatccgtggctagagctagctcgtcaattgagaactccattagctgcccaggattactaaacttgctagagt

SEQ ID NO: 50925 - DNA, 583 bp, Arabidopsis thaliana columbia
tcaaattcagttatgcttgtgttgtttaccttgtgttctactagctattgaagagtgtacgtaacgtttacattttttgattcatatccttaattctgtaagaaggcaacaccaaagtgacatagctgatacatatcgattcaggaatatattgtttatgattatgcttttaactagaactcttttatcgatcaaaacaatcttgtattgttcatctgtgtatcatgaacgggatcaaaaagttgaaagtatcaagagtgtgcatttgcacaaggtggagggtttcggcattgtgattgcgggcagctttaacaccgtccagtcaaacacaaaatcaaactgaaaacctgagataaacaaatactccattggtggcaacagaagtattaacttaatatatcctgagaggaacaaggagatatcgaaaatgaatcaccttcacgaataaaaaggtcgcggaacagtctcttcagataggcatagtctggcttatcatcgaacctaagcgagcggcagtaatggatgtaggttgcaactctattggatgccttcacatacagtctacgaagcaatgatgcaaagt

SEQ ID NO: 50926 - DNA, 409 bp, Arabidopsis thaliana columbia
ttatcgttacttgatttcgttttaaggtacaatttgatagaagtatatatatatgtcagtaagtttagaaaattggataagagatttagattgagtccacatatataaatatggagagttgaaagatgagtcactaatcatctacagaagtgaaagagattgtaaaataaatggcttagacgatattagatggttcctagttagtcatatattttctagtaggtttgaaaagtattcaaactctttagtttactttcctggtacttgtggggaaagaagtgagcaatgaacacgtctaatttaaataacgttttcacaccaagtcgttagtttcatattgtgagtcattgaatctactaccatcatggacccccacaaccctcataaagactccacttgcggtttgcta

SEQ ID NO: 50927 - DNA, 509 bp, Arabidopsis thaliana columbia
gctcgacgaatttgatcagcaaaaccatagtgcaatgcctcgaaacagtgacaagaatcacaacgaagataagaatggttttcatggggcaaacagtgtgaagacgacttcctttgaagaagaagcgcttaggacaatgaaagccttctggctcccatcagctacaccagcagcttcggtcagagtagatgctccagaaactcacacagtctgtccagagggcaaagagaagctcaagcttaagaacctctttgcaattcgtttcacagaagacaacagcgaagaggaagagaccaagacaaaatcagcatcttcaagctcttatgataaatcctacatctgcccgagctgcaaagtcactctcaccaacacaatgtccctcgtggcacttagctcatgcggacatgttttctgcaagaagtgtgctgagaagtttatgcccgtcgacaaagtctgtcttgtgtgtgaaaaccttgcaaggataggaacttggttgggttaagaaagga

SEQ ID NO: 50928 - DNA, 545 bp, Arabidopsis thaliana columbia
  unsure (1)..(545): unsure at all n locations
tnnnnnnnnnnnnnnnnnnnnnnnctaaagcggtgcattgcccgtatatttttcgatatacaccaacgctgagttaccggcacaggcatttgcagctgcgagctggggatatccgccgttaacacgttcgcactgccgtttttacacaagccattttccagatctggccatgcaccttcatgcacgcataccacgccttttttgatcccgtcagtcaccaccgcgcctgtcaaaatctgaccacgtttgttccagacacgcaccagatcgccattcgcaataccaaagcgtgcagcatcttcggtgtgaatagtgattggttcacgatcggcgatcgcatattttttacgcagttccgcatagttaagctgactgtgtaaacggtgtgccggatgtgcggtcagaagctgtaactgcttctcgtcggcggtacctttccattcatcaggagccagccaggttgggtgtgccgggcaatccttatagccaaatttttccaacgttttgaatagattcaattttgcgcttgcgtacccagcgcattt

SEQ ID NO: 50929 - DNA, 516 bp, Arabidopsis thaliana columbia
gtcctgcacgctgcattgattgagatggttccactatatttactttctccacagacttaggccaaacctctttaaccgccctgcaagatgttacaacgaatcaataatcaaaataaaactaccaaagataacagggaaacatctatctcctcaccagaaacctgaaccagtgccagcaccaaaatccagcactcttgtaggcgtaaaacctggtactcttcgacgaatctatataagaatttaacaaatctcaagctcaattctctacacaactatcccaaatggtatcaccaatgagaaagtacctcgatgaggactctatagcagacggaaaagacggcaggcatacgagaagcaatgtaagcagcagtctcaccgtctctgtattggagaccgctatctccataaacggtttgtatctccatcgtttggtctctacgagtcatagaatcagcagactcttggcgtggttcaggtactgagattggtgtcttgatccttggaatgattcgatac

SEQ ID NO: 50930 - DNA, 1311 bp, Arabidopsis thaliana
tccaaacctccaaggttctagggatctcatttcctgcacattaacacagactccataattgatcactttatctctaactacttaggttatataggaagattccaaacacgacctttttttccacacaaacttaatactactgatggggtctaaaagcatgactaacacaacaaaaaatttccaaaggcagcaaacctaaaattaggaataaaaatctgaggagctaggatacaaaccctatgaatagtttttggtaccaggtctttgaggtattttatcgaacacttaacatgcatacacaaagaaaaagacacggaggattaccgtaaccgataaaaacccatataaatgatcgtatacatggtacaagagcaagtaatcggtaaagtaagaggctttgaagagctagattaccgtttcagttcttctcctccaccgaagagtttggacctcagagataggttctctccagattagaaattttggatttattaaaagcttcaaaattcaacgactttgcacttgtacccttaagttttcaattttcacagaattacgccttatctagaacatatctcaacaattcacaccctcttattttaattccaacatataaaaacccagtgattcaaatcgcaaacaatcttttcagggaatgatgctgtttcttatccctttgtatttcagaattaagaaaaatacaaagattgtacaatttcaaaacttaggggtcaaattcgaaggaaaaaaggtctagaaaagtttcagttttccaatagtttgatcttctcaagagaagtattcatctgcctaatctcctcttcagacaagcttttgctacactgctcaaacttctccttgtcgcacttcaaggctgtgtctctacacgctctgatgcaaccgctaatatcgagcaagtttaagatcaccggacagtttccgatgcttttgaccaatgtgattgctaaccaaacttgtctgtgttcttctcttgatgatcttacaatgcatagcttcgtgattggattcacatatttcacttggaaggaaccgagagacgaacctagaccacactcgccgaaattgacgaggatactgtctttgattgctttcgagagattgaattgtgtaagaatgatcggtgttccttctccgagaagatccttgtccggatccagaaaaacttccattaacatgtatctgttcttaaatcccccatgcttcttcgaatctcctcgatttgatgataccaagtcggcggctaaagatattctgaacatgtagttagggcatttaatatgtaagaagaag

SEQ ID NO: 50931 - DNA, 438 bp, Arabidopsis thaliana columbia
tgttaatcatttatttattatatttggtttttgatttgaaaaggaatggataatggataaatggtcggataatgcggccggagacatgcttcattccgaggaaacctgtttttgatagctcaacctttgttgactctatctccctcctactttcttttatttttatgatttcaattttcataaccataatcatgagtctatacacaaacaagaatataactagaacaccttttgttttcccattgatacaattatatacagtaaagaaatactattacacaactttatttaatttaaacgaatccgatgaagcaacgtagaaatgtgtccctcgatctaaaccaaaggcacttggcccataataataataatttttttgtttaattatactactcttaataaattcgaagaggacaatttttttccttggtttttttt

SEQ ID NO: 50932 - DNA, 520 bp, Arabidopsis thaliana columbia
tgcttctgtctagaaacactaatcaaccagttgttgagaaaaggcaagaatggtgagctcacggcgcagacgatcacagtgccgttcgtggcgacaaacttagctgcctgagcaagggtatagttacgccattcagatttggcatgcggagacaaagaagaagcataagaaggagaagagactttgttcggaaatagcaacaaaggagatccgggccaaggtaagaatacaccgaggagaaggaagagagcgagaaggacaaggaggagaccgttgcggctaaggagaaagatgggacggtttgagattgaagaataagaacgaggagaagaagagaatggtcgttgttggtgaagggtctgttgtttctgcgccattgttgtagcaacagagcaacaagatttgcagagagactttcacaagcttgaatcggattcaagatagagaaatatatattagaaaagtcaaagtttcttcgtagcactttaagtagcacacacgaaattaattaaacttgtat

SEQ ID NO: 50933 - DNA, 854 bp, Arabidopsis thaliana
tcaaataatgcttctgagttctgataacaccaacaatctactactactattatattttcttacacattttgcatcactctttttcaggatttttggttctcgagaaaaaagtgaagatttttgagattctctttcgatggattacgaacgaatcggaaagacccaggtgagaaaatgcttcggtttcacgtttaccgaaactgggttttgcgtaaaattagggatatcaaaagccagatttgtcaattttctgatttcttacttcaaagtacaaactttccttttgcaaatcacttcatcatcatctctgtttttgatttgataaactctgtttcctccgatgaataggttactagtagcggcggcggattttctccggggaagttaaggagtatgcttcttctaggtgttgatagaaagaagaatgaagaagaagaatcaactcctacaatgagatctgggtctaatcaaattgatgaccctagggtttatggtggagccccttaatcatttcttaatactctttttaataacgccttttgtctctatttgaatctaaagtttgcatctttttttctttgcttttgttgttttcaaatgttgtagttgctagtggattagatgattgcaaagatgttgatgttgtgagtgagattactgattgttctacttcagggatagctagatcgattagtttgggtcttcaagagtattctgattatgataatgtgaatgagatcaagagtgtttctgcatcatctgtctttgagttcaaaagactgagaaggaaaaagttaatcaaagaatgcctattagatcattctctaaaccagctccatctaaatgggatgatg

SEQ ID NO: 50934 - DNA, 525 bp, Arabidopsis thaliana columbia
aaaattattaattacgtcgataaatacatatacactagaagtaacaaattacagcgaataatcacatcaaagaactatgcagaaaccgtaatatctcttcctctctcttttctttttctccccttgttcgatcatggagaacttacctctgcatgtcttcgaaaagattttattaaaattggatcccaaatccctagctatgatgaaatgcacgagaagatctatcaactcgcatatatctgaagatccgtatttcaaatccaattacttgtctctggtcggattcggtttgctacacaactcctactatggatccaaatctctcttctgcaaccctttcggcgattctatgccattcagatacacatattccttagatatcaagactaggtttctctgctcttgctctggccttctcttactcttcatggattatctctgcgtcgcgaatccgctcactaagaggtatcgattccttgatcactctaaatcaatctttcttggtcgtgttaaaaaaaggggaga

SEQ ID NO: 50935 - DNA, 533 bp, Arabidopsis thaliana columbia
gaatagatgggtagtcttcaaaatcattgcacaaatgaaaaagatttcaagaagaagaagacaatctcagaacagatgggagaaaaaaatcagaggtttatctaaaagctaaaggtgagaaataagaagactgaccaaatagtaaagtctttggagaatagtaaagaaagagccaattcctaatccaatctcctaaattttgtgacgacgattcaaaaaccgtaagcaatgtcgtcagcaattgaagacgacttgagttgtggtgaagtgggtctatgacgtcttaaataacgtcagctttgagaaatatacacaaaatgctaagtagattgatgataagtggaccctttctaataaggtcataacttataaaatgggttatgttatgtctacacaaaaactcaagataatgcaagagtagattgatgataagtggacccgtttttaatgggttctgtattttatttgaagagcatgaataattgaatttatcaaactttttctttacttggtagttggtatatatatgatga

SEQ ID NO: 50936 - DNA, 524 bp, Arabidopsis thaliana columbia
  unsure (1)..(524): unsure at all n locations
tgcagcttaaatcaaaatgatatgtagaacctacaaattggataccaggatactatacagcttgagccatccgacatttttcaagaagaggtcgaactaaagtttcctaatgagcaaccccgatccttagagttaaataaacaatttaggaacctgaaggtatttacttggcacacatcaacaattattgaatcattgcgagccacatgatttcgccaatattcatcagccacttctgcgtctggacggccatctccatcttttgcttccacgtaaggcttgttctttacacggtttaagtcctcgtggagtccatccagcaagaaagctagaagctcctgcaaccaaataaaaaacctcaaaaacatgaatggaatatctcaatatgcagtctttaatgctgagagacaggaataaaacatcaggaaggctcacgtaattcagattctataaactgaagtattttctctgacctgcgaatcatgctgattnaagcactaaactgaggagcaaacgagcaagtt

SEQ ID NO: 50937 - DNA, 259 bp, Arabidopsis thaliana columbia
gaagaaatgacggcatataaaatgaacataattgtaaagttaaactaattgttttgattatgctttaagttcttaatagactttttcatttgcgcacacttatattttaaatgatttctgtaattatctaaaataattaaaagctatagtttattaaatagttacataatacatacattatcactcgatcgcagatgtagtagactactttatgcgtagagtcagtgtcctatcatgaattacagtactgagcggcaat

SEQ ID NO: 50938 - DNA, 581 bp, Arabidopsis thaliana columbia
ggtagacggcgatgagtccatgagctggtcctcagcttcctcggataacaacaatgcgggtgcggcggctgcttatgccgcaaccaccacccatgtcgtgaggaaaaaaaggactggtttttgcctttgcgctaaatcggctaatagttataaagaagtttcggaggatcctgacgatatttctgcttgcatcaatcggcgaaaaggcgttcctcaacgatctcctctctgttaacgtactcttttcttctttgtttttgttttctaatcttctttattagtttcttttcaccatatagtcttatatgttacatgtatggattcttgtcgtgcggtctctctaataaagtttataatcagttttttattttattttattttgcttacgtagatattagtttagcataccttataaattcataagaaaaaaattatcttatcgcataataatatgtttcttctactctggtatcctcaatatccctaaaaggcctcagcgaagtatttcttttgtcacttaatatatatctaacctaggttgaagtcaatgtaatttgtctttgacatatgaaattgtacat

SEQ ID NO: 50939 - DNA, 536 bp, Arabidopsis thaliana columbia
aaaatattaaagagaaacaaattaccataactatgaatcgccaaagtgatgaaaagagaccaatttctttaaatattaatttttacctttttaaggtaacttcagtttggttaattggaaaacaaaaatttagggggcggggggggggggggggtaagcagggattttttgtcgggggaaataaaattgattccttaaaactcttcaaagatttgaaaaaattaagggtggcagctgcctcatcttaactaaggtagatccgcgcctagatatcggcttggttttggtttagaagaaaattcaaaaatatcgaacatatcacaaatggagtgtttgaagtaaaagaaacaataaaaaaaaaatcgtaatggattggtacacgtacgtgaaacacccccaccatataaacattgtactaattaaggtgatacaactaatcaaacaaaatctagaatttggattttccatcgaagcaagtcggcttgagaaatgttcgtgagaaatgtacatgcagatgcaggggacggcccaataat

SEQ ID NO: 50940 - DNA, 597 bp, Arabidopsis thaliana columbia
gagtttattcggaaatattaagccctaataacccgatcccacccgacccgacccgacccgattagtgagcagtgaatctgaagagcataacatgcaaataactctcgccgggattaacaatctgcgacggaaagttcttgtgattgacggaatctgggaagccttgagtctccaaacacaagccaccgtatttctcataaacggctttacctttaccgacgacacgtttcatcatattactcgtgtaaaactgaacaccaggctgattcgtccacagctccatcttcctcccggtgacttgctccgtcacaaccgcagttttcctcagatgtttcccgatcggtccgtcgatcacgtaattgatgtcgtaaccgccgggtaattcgtggatccggctaccgatctcacgtggctcgaggaaatcgtaaggagttccggtaatggaggtgatttctccggtgggaatgagtttgtcgtcgacgggagtgatttttccggcgaggagttgaattttgtgggagaggatgttcccggagttgtggctgtggaggtccagtaagtgtggagagctaagttgattggtgtaggtatgttgag

SEQ ID NO: 50941 - DNA, 507 bp, Arabidopsis thaliana columbia
attgagtgttagagcacatttgcttccctcatatcaaaactaggattgagattctgcagctggagattccggaatcgagacttggctagtgtttggagactttccttgatttcctgcataaaacacactctctaaactctcttcacctatctctcttaaccgattgagctcaggcaatatctctttcccgaggtcaggtctatcttttcttcttagttccgcgcattgaagcgaaactttgctaaagatagagcttcttctataggccagtccggtactgctggatcaagcatatccttaagagtcccttcttcgatcgcttgttcaacgtaataagccaaacccattggctgttttgcggttaagatctgcaaaagcatgattccaagagaatatacatctggcttcacacccaacattcctgtttgttggtactcaggatcaatgtaacagaaagttcctgcagctgaagtgactctgtactgtgtaacgttttccgctactgca

SEQ ID NO: 50942 - DNA, 1323 bp, Arabidopsis thaliana
caccttcctttcaacagtcggatttgtgatgagcagtgagagtgatcccaatcccactacgaagtaatcttttaactagcttttctcatatttcccttgaataacagcattgaaaaagaggtggtttctagtttcgacccgtttaatgcagaatttacatgagatatcggcttgtatattccacttctgcatgtaaatgccaaatgatcagagcacattttagcatactagtattatattacgatcctcacaagccaacctgacataataaaatgacataatatatggtactattttatgtcatgaaattagtgatacaaaaataaaattgaaggggtcaatagaggatttagaacaaaagatatagggatcatcataaacattattaaccagttcacttaagttttacacttaaaaattaaaatacaaataaatatttataatttacaaaatctgttggggtcagttgacctcccaccttaccacgtagctacgtggttaaaacaatatgttctcgaacgtatacttgttccaagttaccaatgcaacttcgatattaaaacaatattgtgattactgattagtcatgactcatatatccttttaatcctaactaattaataaacataatccattgaaaatgcgaacccattgcaatattgcatcttttaagttgacgtcggtttagtaaaccgttgccaataccaatgcttctcccaaacttgatacatagaatccacaggtatccctttggtctcgggcaagaacatgatgacgaatatcgtcattgtaaagatccaaccgccgtaaaacaagaaagcaccgtacttgaaatcgcagagcgttgctaagaacgtttgagagagagcaaacgttgcggcgaagttcacggcaacgcttaagctctgaccagctggtcgtatcttgagtgggaatatctcacttgggacaagccagcttaatggcccccacgaccatccaaacccagctgcgtatatgcaaagtaacaccaccaccgtcacggcgtaacccttcttcatctctccgtccccggtggctcccactgtcacagctagtaacacagccactgcaatctgtacacaagattgagttatcaatatttggcaattggcatgtttggcccaatcacataattttttttttgtcactcttaacagtttagtataatttgaagatggtaccaaagtaaaacgttactaaaaatgcttcatatttcggaacacatttcattttagattttcatagttacttttctaagattatgttaaatagacgaagaaaaaactaaaaaatgtgataagt

SEQ ID NO: 50943 - DNA, 1555 bp, Arabidopsis thaliana
cctgcccctagattctcatctcaatcatcgtgtcttcagtcattggcggtatctctcttttactaatcgcgattgtcgttcatttcctaagaaatcccgtggaaccaacggctccttatgtgcacgacaaggaacccttttttcaagaatccgacatttactttgtcccgaaagaacgattcacagtcaaagacattttggaagcaacaaaaggcttccacgatagctacattgtcggtagaggcgcttgcgggaccgtttacaaagcagttatgccttcaggtaaaacaatagcagttaaaaaactcgaatccaacagagaaggcaacaacaacaacagcaacaacactgataacagtttccgcgccgagattctaacactaggcaaaatccgtcacaggaacattgtcaggctatacagtttctgttacaccaaggatcaaactcgaacctcttgctctacgaatacatgtctcgggaagccttggcgattacttcacggcgggaatcacatagcatggattggccaactcaggtttgtatcgcactcggtgcagcggaaggtctcgcttacttacatcatgattgtaaaccaagaatcattcaccgtgacatcaaatcgaataacattctcatcgatgagaatttcgaagcccatgttggagatttcgggttagcaaaagtcatcgacatgccactatcaaaatccgtctcagccgttgctggatcctacggttacatcgctcccggtaagtttgtaaaaaaccgttaaactttcgagtttacactaacttaaagctaaccgttttttaactgttttttttttgttgcagagtatgcatacacaatgaaagtaacagagaaatgcgatatctacagctttggagttgttcttcttgaattgttaaccgggaaagctccggttcagccgctagagcaaggcggagatcttgccacgtggacaagaaaccatatcagagatcattcgttaacatctgaaatcctttggtccttatctaacaaaggtagaggacgatgtgattctcaatcatatgatcacagtgacgaaaattgccgtgctctgtacgaaatcttcgccgtctgatcgaccgacgatgagagaagtagtgttgatgcttatagagtccggtgaacgtgccggaaaagtaattgtgtctacaacgtgcagtgatttacctccaccggcgcctgccgtgaaaaaagttctttttataacttactttttctttctccgaaattgattatgtatagattaatatgatttgtatagtcattatagaagaaagagatttttttttttttttgtcatcatcatattgaattatattgaagaagtataatcacaatgtaaagcaaaacttattacacggggacccagaaatgattagcaaataaaaattgatgttgtagtggtgttcttgcgaggatgtcagctggtttgttgttctgcctgttggtccattgaaattgtgtctgctcaaacttcgatgcccaccatagtatgtctcgaatccagttaaaggctccaaaatgc

SEQ ID NO: 50944 - DNA, 919 bp, Arabidopsis thaliana
cattgtaacaaaaacatatttgtctaacatagtaaattaatctctatattattaaaagaaaaaataaaaaacgagaatatagcttgtaacacacatataagatgttttgtaattacttgttaaaagagaattgctcatctagctagctagaggattaatcaaaagaagatatgcacttataaatgatgtaattgtgtatactatatagcaatctcattaatttgcttatatgaacgaagaaagtcagagcttggggacataatgaacgtccttccatgaacgcctgcactcaacatgggggctccacctgctgttgacacgggaggctttgtagcgtttccagtcacgaagagcaagactgagatcagagatcttagcagggatgtggacgcaacagttggcgtggacggttgtgacagcccccatgtcagggctgtcttggcagaaaccgctgaattcggccgtactgaggaagccaacgttgagaccaagctggttaaagaagccagagtctaggagattcttgaggacgtcttgttccttcatgcccaaagacttgagcctcatgtcgtaccatttctggaagagggagatggtcttgttgttggaccgggcatggtagaatcccgtgttgatcaattgtcctctcacgttatttctgtccacgcttatatgcatatccaagctcacgtttagccgggacaagggactccttagccacatcacgtccgtatcctaacattgtatatacactacttgtttgagcaacaaattaagtgttttgttatatatgttacaaaatcaagggacggacctaaccgtgaaaataatatggtagccgcggctgaggacgtctaggagcaagcgagtcctcctccacatcatctctatgaaatcttttgacatgtatactttctct

SEQ ID NO: 50945 - DNA, 548 bp, Arabidopsis thaliana columbia
  unsure (1)..(548): unsure at all n locations
attagcggtttttagatttgggcccacgtgcattgatgtcagatggtcaactccacagacaaaaaaaaatgacggtttcctatgtttttggacttattattagatccgtactgggccggaccatcaagcccaattgtcttatcctaatcaaatctactgttaggagcgtgaccagctctagctatagtggacattccggtttagtttcggtttcggttatcttggttttcgtttttaatttgaattaatagaacgaaaatcagataaccagcgttttagttatggtttcgtttccgattatatcgattttaattcgaccacttggtttatagataaatatcggttgaaatggtttggtttagttttttttttcggtttagtacggatcaaactctactacaattgggaagcgtgtaactgtcaacgagcgtctcaaaatctaaccgttgatcaattcttttgacggtcgtaaattcgccggcaacatcgaacgagaagtcaccggaaaggtcacggagaaatgtcccnccatgagcttctccggtttc

SEQ ID NO: 50946 - DNA, 584 bp, Arabidopsis thaliana columbia
ccctttttggattgttggtaacagaccaggatctctatggcattgcctcacgcctgcgtaggttgctactacacgtgctatgccgaaaatccggaaagcagattcttcgaagacaaagtgataaaaactaggcaagatatgatcaaaagtggccgtgttgccgttaccagtaccacccctagagttcgccgtgctctagcttagcctgatcatctttttttccttggtgctaaattttcagaatgaaataactagttttttttttaaaatgtatttaaatttgaaaatgtaatttaattacagaaagagtgaagagccaaccaatatcagtaggggtggggaagaaattgtggatagagataagctcgtgacatggacacaatccaactaatgacccaaaagccaagttggttgagagctttttaactttttattttttcctttgttgttgttgagaccctcaattactttctgtacataatttattcttttgtccttcctgtatatgggtatatcctttcttggttttggaaagtagtgtagttttgactttaatgactattagtaatagtggtacacttgtt

SEQ ID NO: 50947 - DNA, 548 bp, Arabidopsis thaliana columbia
cctttcttggttttggaaagtagtgtagttttgaactttaatgaactattagtaatagtggtacatcttgttaaagtacttcaagctttagctagctttctgtatatgggtatatatttctttctcttacttagcttcattgagttcagcaacagtgatctctttctacttataaaattttttagtcttaaaggcccatcttgaaagaatttgaaacttttacaagaatcctatcagttttataacatcttactacaaacaatcataggcccatcagtttttcagttatcaaagcagagaggcccattttacaattatactaaacgtcatatgatctccattcttcagagaaacaagtccaatcttatcatttacatgaaatctaaaacccgccacgtgattcgtcgattacacagaacccatatacctgaagaaaaaagaaaaaaagaaaaaaaaaagcgaaattgttgtttgaacgtgtggtcgaattttatcgtggcgctgaattagcatcccaagtgaagaaacagagagagaaagacagagag

SEQ ID NO: 50948 - DNA, 508 bp, Arabidopsis thaliana columbia
atacttttcaaaaaatataattgtttacacaaaaattatatcattaataatacaaaaaaacattttcacattttttaaaataaattttaataaatcttacattttatagtatcaaatattactcataatatattactcataatatattaaaatttgttaaaaacattattttgtttattaaatatatatatatcggtatatatagagattgttaatataatatttatgttgttattctgcaaaatatatctcatcaatatatttcaaaactaatttcattaatctacgggtttttgtgaaacaagaaacacatagttaccttgttgttgtgagaagagtgatcaagagagtattcaagcattaaccaatcagttttgaccaagaaaattttgtgaacaccttcaatattttcctaattaacatcttctaacaaaaattaacctaacgacacactcattgtacacatgctttttggttgaataaattttaaatgtattgaaaagaaagg

SEQ ID NO: 50949 - DNA, 508 bp, Arabidopsis thaliana columbia
ccatatggtaaaaagagagagaatagcttgtaatatatacctcaagagtctcaaaagatttcttcaagtattcaacctcggactcaaagttggctacatagagcattgcatcaactcttttaaaggcgaaagggatgtccaacattgccttaaggaatttctcagcatgtccaagcttaacaggcgaatcatcattgtacgctttcaacttgcgctcttcttcttttgtcggtgccatcttcagtaagctctcaagaagttcagtccccagtgtatcagcattgcctgaaaaagcataactaagaacatcaatgtaaccaagaatctccacaccatcaaagaagcaaagctttcagaataactcaaccatatcatcgaaaaaccattaacaaatgcataagaactctaattctggagatcaaaggagaagaaaatgagaaactatgtatgtgacagcatagtttacttcaagaagagcccacaaacttcttctatagtgacattaagt

SEQ ID NO: 50950 - DNA, 598 bp, Arabidopsis thaliana columbia
ttggtgagtttgagtaagtctctttggcattaaccggcatatggaaaaactctctccaattctccctagccgcgtccatcagctccggtttgaccccgtggttcaccacctggaagaacccccacccacggcaagcctccgatatccgagccatgatgacgtcatcagacaacccttcatgctagaagagtccttcaaggtctatgattaggatgttggtcgcggtaggagcgtcttcggtcgtggtgcagcgtagagacgctggtttgatgtaacggtcgacgagagcggagaagttgctctcggctaaggattggactcggacgattggctcagcgcactcatccatcgatcctttcttcgtctcgcttttcacatcaatcttgttcttgttcatcttctttgtttctatttattcttcttgttcatgtgagacgttttagtatataaagaagaggtttgagaaataattctaattttgattgaaggaaggaatttaaaagaagggtaaaatggtggtggaggagaatctagaatcggctagagacgatgaaacaacgtctttgttatttaatgaaccgtgtgaataagtattgat

SEQ ID NO: 50951 - DNA, 651 bp, Arabidopsis thaliana
aaaaagaagttgatctcttccctcaacatctgtagcccgaaaacccaatctttccatgtcttgtagtaactcaatgcccttgtcaagttttccagacctacaataacctgacattaccatgttgagagtgtatgggtttggagatatcttacaccgccgcatttctctgtaaaacctcaaagcaatatccaccctcccttgaccaagtaatgaactcatgtaagcattgcaagattcaacagttggaagaaacccataatccttcatctgcataaaagtatctgtagcatttctgaatttcttcaaatgagcaaaagttttgaagagtgaatcaaacactctaggcgtagaatcacattcccggtacgaatacaacaaagcatcaaatactttggcaggcaaatccacaccaccatttacaagtacatctctcaaaatggactctgcagacttgaacttgcggtttttagtgagagtgtgaagaactatagcatgggtttcaagagagtgagaacctgggtttcgggttttcgcccagttgaagaattcaagagaaagaagataatctttctgtatcttcagtaatacgttcttgaccctaaatgaatccaagtggtctgatagcttatttagcttatcccaatcagattg

SEQ ID NO: 50952 - DNA, 860 bp, Arabidopsis thaliana columbia
  unsure (1)..(860): unsure at all n locations
gattgagatagctccacactattatcagctcaaggacgttgaagatggtaataatactgtgctttctcttcgtctaatccttacttggttctatgaattcggaatccatctctaatattaaataatctcatcccatgatgtatcttttttgcagctacatccaagaaaatgcccaaaaccagtggccgagctgtggtgtagcaactttgatcaaacaaagatgatggagaaactgagaatgacgatatttgctaaattgttgatttgcatataaccccctctaattaacttagatatttatattaatagaagaatattaacagtttttttatttttctcacaaaagttggattttattgaactgaagtactgaaccaacaatatgggctaatataaacaaaagccctgtaactatgattttacaaaaattaattaaagcccagcatgagcctaaacataaccctaatgaagaggaaaatacagagagcctccatcactaacacgtgtttcaattagaacaaacagagagcttccatcacaaaccgacattaaccttgccgtacaccaccgattccggtgacaagagtcaccgtcgatattctttcgttcagtaaatcttgtggtttttcaccgtttaacaaaattggagtccataagaggataacagctaaagggaattgatagtatgcttcggttcttctacttcttctcttcaattaaaactgcaaatcactaggataattcctgaaaatctgatataacatatgaaaaaaccagaaactcaaaggataaatcagtgaaaacaattgattagtgaaaattcactanattgaaatcacaatgagaaacccataaaatta

SEQ ID NO: 50953 - DNA, 494 bp, Arabidopsis thaliana columbia
ggatgaatttacaaatatgcagcaataagtcaacagaaacggcgacgtttcggaaaacccccattttccgattaacacagtaactcaaaaccctcaaatcctcaatcgccagtgtttacgaaagttcttgaaatttgaagagatctcacagatgagaagtgctataggaagaagattctcaaaccctaatggcttcaccattgcatccttagtcaaacaaactccatttctcacccaatccacatctcatttctcctcttcctccgactcctccggccgtggtcgtggacgcggttccggtgaagatggaggatttcccgccgctggaagaggacaattcggtgtaaatcgtgaaccggtggttcctggacgtgaaccgtcatctgccggaggttatggtcatggtcgtggtcgtccgatccaatctgattcgatttctcctgcgtctacgtcatttgtcaaatcagattctcttagtattgggcgtggaagag

SEQ ID NO: 50954 - DNA, 557 bp, Arabidopsis thaliana
aatggtactgaaagctgcagtagccaatgcaggcttgcaggttctggtggtgtcgtaagtacaaggcttgttatcagtgctgaatccctcaacagagccgaggaaaacaaagataacagcagcaaagaaaatcatgaagacaccaacatatttgtactccgtgaataggaatgaagttgcacctgtccccacaacaaccaaacagatcccaatattattcactcagaaaacacacatcatctcagatttcacaagatactgaattagtaatttcaacgttctaacaatccaaaacatcatcaaacaaccaccaatcaaaaaacagagccagatctaaaaacagaacagtgagatctgaataaagtatcaatagatcttaccttcggaaatagcagtctgaatctcagcgcacttagcgacaacactctggtcattaacaccttcctcttcctcgattagataatcaccgtatccattcttcccattgttagctccaccggaagacgatgcgccgaggtcagaggtgagtttccgcgagatacaacgtccattggaaa

SEQ ID NO: 50955 - DNA, 581 bp, Arabidopsis thaliana columbia
catatttattcttctaaatttagcaaaaagaacacgatttactttccatttcagtcgtcttgtcactctctctctcttctttaaagtctccctttttagcaaaaattctctctctcacaaaatttatttcctctggcttcttcttcctcctcctccatctcttctctttactctctctttaatcatctctcattcttgaatcttgatccatcaaaatcaatcccgttctcgaaagatccattaaaatcaaaacctaagctctctctcttgcttctagggtttttttgttcgttgtgatggcgagagaaaagattcagatcaggaagatcgacaacgcaacggcgagacaagtgacgttttcgaaacgaagaagagggcttttcaagaaagctgaagaactctccgttctctgcgacgccgatgtcgctctcatcatcttctcttccaccggaaaactgttcgagttctgtagctccaggtctttctttctctctctaacttccctctctatagatttctcataactcatcgaaggaatcttgtctagatccagacaaaaaactttaaagagtttttagatg

SEQ ID NO: 50956 - DNA, 1119 bp, Arabidopsis thaliana
tgacgttttaataacagtcacaaaggtgtcacaagttgcaacgtttttgtaactgttaagtgacttgtgccactaatttgtgactagtttgtgacttattgccgacctaagttgttaccaatttgcgacgctttgaaaattttatttttttgcccaaccatttaggggcatagatttcccccaaaattattttgagtataactgttttgcgaccgaacaacgactcctctaaatcttttaagggtaaagattaaaactcgactttatcattttcttcttcttcgatctagggtttcttctatcaagctctcatctctctcctcttctaaatctcttcgatctagggtttgttcttcttcgatctagggtttatcgaattctatcttctctcatctttcacaatcgatttctctcatctttcgattcgatttcttggtaatttcacaatcgatttctcttgttatggatgctagtggtaagggcaaatcttctagaggtcgaggtaggggatcttcccctagtgttcgaggtaagggatcttcccctgttgctcgagtctcccgtggtcaaaatccaagaggacgtgggagtggagtcgtcggagcctcttctcagtcgtcgaaccctaattcgacaacacagtttgttacccagtctgatagaagtcgtccttcacagtatccaccagcaaaacaagcctagacaataacacccaaaacgacacctcctattcaacaaaccttgtctcctgctcttcaaccttcgcgttctggttctcaacaaccgcctcctgttcgtcagcgtcacgttactattcgtcagcgtcagtctcctcttcatcaacaacctcttactcatccgcgtcagctcctattcaacaaacccttaatcatgaagaggaagatagaggggaagaaggggaggaagaagatggggaagaagatggggaagaagatggagtggaaaatgagtagggaaatgggaaagaagaagacaaccctaatgtcgactagcaagatcgcgctggatagtttactagccctgccaggacgggaacgacttccactcctagcttgagaaatgtacttcatcgaatggagactcatctagtaattgcgt

SEQ ID NO: 50957 - DNA, 614 bp, Arabidopsis thaliana columbia
ctgctgcattgtcagagtttatacgctacaggtataatgttttcaatgtccttaaaactttcttttttttccattttgattttatttcctacaggtgtagttttatgtagtcttactcggcttagtgacacattgatctagatgcatgtaaccatctatctagtaagctctgtttggaaaaaaagttaaggtcaaagtgacaataatggttttagttctaagttatgtgtatataaaagataaggaaagaaagtcaaaggactgaagcatcttgcctgacatgtgttgtaaacaaagcacttccttggtaccttatcttcttaacttttctctactaatatttctgagttgcagtggtgattttagttctgtaatggaggagatggtcgaagcactctgtcgccatgtgtccgatgattctccgactgtaaggcgcctttgtctaagaggattagtgcaagtaagagtaattttcagcagtgtttatttacttatcttgattgtctaagagtactagtgcaagaaagagttatacggatcacctttactccttatcatgatcttctagtaggcttacgataaagtatatgctcatgttggattattacaatgat

SEQ ID NO: 50958 - DNA, 568 bp, Arabidopsis thaliana columbia
gtaagaatgcgactttagagtctttgagttcttcttgaagtgttaatgttctttgtagtagagattgattctccagttccatgttgattcccgctgcagagagcatctcgtgcactgcctcaaccaattctttcgctgtgactcgaccaagctgcatttcattcacaggctgcaggtgacaaagaacaaatccaatcaatcttccccagagcacgattcaagatcaaaactatctcaagatgataaaacattttggggaagaacagtatgcatttgtctcttagaatcacatagattatagataatacaaatattggggcgtgattaaatccaacgattcacgagaaatgtaacaaacctggctagaacttgttttgttagttctggaactttctgaaatttcttgagattttttatcagatactgcggggagcacctccggcaaagtcgagggaccttcattttcgattgaagtgcctcggaaggagaaaacctgagatgaaagtaataaaccagtctctccaggtgtcatttcaacctttaatctgtaaagggcttggcagcagaa

SEQ ID NO: 50959 - DNA, 601 bp, Arabidopsis thaliana columbia
tggtcaaattgaaatttggagtaaaaagtatacgttattagcgtgagtcagacatgtataactttctttatgtggaaggtccagggatcttgtgttagtaaataacatgtgagaactgatctggatttatggaccactcgctcttaactaatcaatttagcccatttttatttcttagtactatatactgtttagaaagtgaatcacgtcgaaaatagaattaatctatatcgacataaggtctaaatatcaattaggctttaaagaaaacaatatcgaagtagtaaattttatttttctatatgatgtgtacggaatagctagcattttagtgtggataaatgaatgcgaataatctatatgcaaatgccataatctaaaaatatatctaaatactgaaagtcgactaagtttcgctttttgtcgaaagaaatcaattgatttaactgaataagaattccacaaactacgaaattgcaaagttgatttcttatatatagagggttaagtagtctagatcagaggaaagggacatggtagtatatacctcactgtcgaaattaatctcaaagttgatgatatattagttcacttcatgatt

SEQ ID NO: 50960 - DNA, 587 bp, Arabidopsis thaliana columbia
ctttgcctttcccagccatcaatagcagttgttcttggcttcataggagtcaagatgatccttgatttctttggtatagatattctctcttcatcggcaatttctgcttgaactaaaccatatatctacaagaaaaactaagctctctcaacatttcttcctctttctaggcttccacatatcaacagaggcatcacttggtgtcgttgcactttctctcagtaccggagtactgttgagcctaacaaacaaatccagcgacagtgaactaagaactgagagctgactactgagaaacagaatccagatgtatccaaccacacagttcataagaataatatcgcattgttcatcaaagcatttcgctgatgtgttactgtagataaaacacacagaaagggcattctttccaagactcgtattctactttttgttttgtcgttaaaaaagcagcaaagaacaagacactttaaatctatttgtctggaagacatgtggttgagcccatgattgctttgagacgagtagaactgtctttgatcgtcaagtcatcccatgtgcagcttggtgctcatcttataagatta

SEQ ID NO: 50961 - DNA, 547 bp, Arabidopsis thaliana columbia
gtgtgagagatttgatttaagagaacactgagaattcatgacaaacaaacagaacgcgacatgaccattctcaagcctgtggtgataggtgaagccattaacagttagacctccatcaatacaaatggtttgaccatttgaccagtaatatattgaagctgcagggagacacaagaagaccactagtgatgaaacttcattcggctctccaacgcgacgaagtgaagttctactcaacaatgcctccttgaaaccaatgtcaaaaaaaaaaaaaaattggtatttgggtggtagagtttaaactgtagtggaaatgctatgcagtcgtataaacatttatatgaatccggtatgggcacaccacagcatttattaattaatagtatgtcataaaatggtatatcaatgtatcatgtagttggtccaaaaggttttctcgttgccatccattgaattttgggtttactctctgtgattgctttattttgagtcctattatatatatgctagttttgaaatcacttttgttattttgggttcactatga

SEQ ID NO: 50962 - DNA, 560 bp, Arabidopsis thaliana
gctgctctgaaaggcaaagggacaaagatggacaagctccggtttgcaatcatgtacctgatctccacagaaaccataaaccaatcggaagttgaagcagtggaggcagcattgaatgaagctgaggctgatacaagtgcgtttcagtatgtaaagaaaatcaaatcgttaaacgcatcttttgcagctacatcagcgaattcagctagcagaagcaacattgtagactgggccgagaagctttacggacagtctataagcgcagtgactgcaggagtcaagaatctgttatctagtgatcaacaattggcagtgactcgaacagtcgaagctttaacagaaggaaaaccaaacccggagatcgattcttaccgcttcctggacccaagagctccaaagtcgtctagctccggtggtagccatgtaaaaggaccgttcagagaagctatagtgttcatgatcggtggaggtaactatgttgagtatggaagtttgcaggagttgactcagagacagttaaccgttaaaaacgttatttatggagcactgagatcttacgg

SEQ ID NO: 50963 - DNA, 930 bp, Arabidopsis thaliana
ctgatctggttctttcatcgcaaaaccatgagttctcattgtcagataataatcatcagttggttgttggggaaaaccatgaactagatgacaatctggaattagccgttgactcaagtcatgaacttgaaattgatcagcatggtgaaatggttatggttagcactccggttcaagctcgagctctcactgctgacatgacttaccaacttaccgttggacaagagtttccagatgtgaagagttgccgtagagcactgagagatatggcgattgctcttcatttcgaaatgcagactataaaatctgacaaaactcgtttcacagctaagtgttcgagtgatggatgtccatggagagttcacgctgcaaagctccccggggttccaactttcacaatcagaacgatccatgaaagccatagctgtggaggaataaatcacttgggtcatcaacaagcttcagttcaatgggttgctagctcggttgagcagcggcttcgcgagaatccgaactgtaaacctaaagagattcttgaagagatacaccgggttcacggaatcaccttatcgtacaaacaagcttggcgtggtaaagaaagaatcatggcgactatgcgcggatcttttgaagaagggtatcggttacttccgcaatattgtgagcaggttaaaaggacaaatccgggaagcattgcttcggtttatggaagtccagctgataattgcttccagcgtctcttcatatcgtttcaagcttcaatttatgggtttctaaatgcttgtcgaccgcttcttggattggacaggacatatttgaaaagcaagtatttaggtactttgcttctcgctactggatttgatggagatggtgctttgtttccgttggcgtttgggattgtagatgaagagaatgccgagaattggatgt

SEQ ID NO: 50964 - DNA, 555 bp, Arabidopsis thaliana columbia
acatccctgtcatataactgacatcgtaaagcatataggatggtaccatccgagttcacaaacctcactttgccaataccattgacctctgtgaataagttgtttgccattctaaccatccctgttccaatttcctgaaactcaatgagcacatctcttcttggagtcatgtgaaacgagcaattgtgtccattatccactcatcttgatctgcattctcagtgagattcacttcagatgcgactagtccaatcagatcttgtgcatcatctttaaccagagctgattctccttgttgagaattagccttgttcctctcagatcacttatagcactgtcttttaaaatgtccctctttaccgcagatccaacagattttcttgccctctttcccaaacatttgatcattaccctttgcatgtggtcttctcacacatacaagccttcaccaaccggtcttgaatccctaagctatcctcagctccactcctttgacttagcacacttattcatcaccaccttatacttctctacatattcgatgtttttcacata

SEQ ID NO: 50965 - DNA, 290 bp, Arabidopsis thaliana columbia
gaacccatatctgaataaactacaagattgaccaatcaaattgacaacacaatacaaaaacacaacaacgttctctgcattccgctagcaatcatcaagattcccaagttcttagacaatctaacaacagtttcgagtttgttgcaaattagatccaacacattctccaaagacaacacctttactatctctacttaaccttctgatacagaaacacaacaacgttctctgcattacgctagcaatcatcaagattcccaagttcatagacaatctagcaacactttcta

SEQ ID NO: 50966 - DNA, 598 bp, Arabidopsis thaliana columbia
ctctagagggagattctctgttttcaacagagcttctctctcacgaagctcctcgacttgacgacgaagctcagaaacgacgccgttatgagaagcagcagcagcagtggcgtgaacttgagcggaagcgcgtgggaaataaacaccgaaagagcgagtgaaacccggtttactaggattaatcggtggtttagtagtagcggaaccggaagaaggtggtttaagtggaggaggaggaggaggaggaagaggtaaaggagaaggcatgtctttggtttttttagtagaaggtgatttgtgaaaacccattgttacacgaaccttaccagccaccattgatgagtgaatgataaaagctccaccaagtttcagttttttgattgattttcaaaaatgacttgagaagaaaggagagatttgcatggaaattaaaagcatgtcgttgtccgtgcagttcttgagagatagagagagagagagagagtgatagtgatgattcaaagtttgggcctttggattaagaagaagatgagactacttgagagagtaataaaaatatgaaaagtttgtaatgtttaaaaaataaataaagaattgg

SEQ ID NO: 50967 - DNA, 551 bp, Arabidopsis thaliana columbia
tgatatttgtaagttttggaagctggatatgttggaagaattttctcaaatagttctcaaaggaaaaaagaaaatcatcctcgacatcccgagcccctctcagcagaacaaaagcgacatcgtttcgttatgtcctgctgatagtcccgaaacatgcaattcttcgataccagactggctcgtgaaagtgatgagaaaagagaatggatacgatccaaagctgatcataaagaggagggtgctgtgtacgactgatctccgtaaaaaccaggggtgtctctcaatgcatctcagcaaattagagaagtcagattttttgacagaggacgaaaccagattcttagatgaagactttttaaaggctaaaagggatggtttgaaagtgtttttggtggatcctgaatcggataagcatgtcgtttatttaaagaagtggaatggtaatacagtttggaaatatgtgttaagtcatggttggaacaatgtgattgataaaaaaatcttcaaagtcaatgacgtgattgaaatctggtcctttcgagatggaagtg

SEQ ID NO: 50968 - DNA, 393 bp, Arabidopsis thaliana columbia
ctgtttcttttcaaggaaatggagataagattaaactaccactatcatgttttactgagttgtctgatcaaggagctttcgataaaggtcctttgtattttgagctctctgttgttgaccatgcggataataaaaagacaacacattctggtgttcttgagtttactgctgaagatggcactattggacttcctccacatgtgtggagcaatttgttttcaacgcatgatccaatggatgttcctttggtggaaattgggtatatccgattgcctaaaggcagttacgcgaacttcaacctgataaccttggtttctcaggatttgcctaaccataaagcaactacgtggaactattcttcgtcaacatgcctacacgttctttagacgatgt

SEQ ID NO: 50969 - DNA, 473 bp, Arabidopsis thaliana columbia
attggtttagctgcaatggtcacttcttctcttcttttgtttcttctgtttacctctcattgctatcacatcatcttactggttacttattcgcttgcagggaaatcgagttattgcggaaattcagtttgcggattatattttcccggcttttgatcaggtaaaaatgctacctttacctttaaaccaagttatgatgacgcatgagttctctttatggagttttgtgatttcgtagattgttaatgaggctgcaaagttcagataccgaagtggaaaccagtttaactgtggaggtaaactcatatcttcttgtgccttcttggttatgagacaccaagtttttactcattggggtttatgtgacaattgtaggactcactattagggcaccgtacggagcagttggtcacggtggacattaccactcgcagtccctgaagctttcttttgtcatgtcctggtacaaagta

SEQ ID NO: 50970 - DNA, 637 bp, Arabidopsis thaliana columbia
tatccacttaccaatgatgtactgaaggataaaactataaaagatgaagtgccagatattagagtattgatgcaatatcataggaagaaacatgtaatgcttaccgcggcatttgatgccctcgctggacggtttcctttgtgcagcatctttgcgatctgagaggctgccgttcttgtctttgtgtttcttttccgattatgtaacatgtttggtgaagagtagtacaagtatgagcgaccatgcaatttgggcctcctcctaagcctatcactggttctaactggcttagtaactgaaccatctccttgacttgatcgcttgggatgcatggataaatgctacctctgatggttatctccttccataaacaactacaaacccaagagtcacaaatcaaatttcacaaatcaaaagaatcccagaaggaacacatctaacattctctcacatacacggccctttccaggtacgccaactcctaatagacatgcattcatagagataaaacctgaagagaaagccactaaacctccgagcaaaacaatgaaaaatctaaaccaaaccctagaaactgaagcggaaaatgatcatcctcaatcaaatctacggttactgttgagaaatataaacactt

SEQ ID NO: 50971 - DNA, 527 bp, Arabidopsis thaliana columbia
cagtcttatggttctttataggtttttttgtcccgagacaaccaaacgaaccctatagaagtcaagaatactaaactctaaacttaccaagtgaaagaatagaactctccaatcaaagttatcaacactaaactctaaaactgatcactttagctaattatgaagttgagatttgacagggcaaacataccgtgaatcgggcagggattctctgctcttgaacaacaacccttacaagattgaaaagggcacctgcatttatcaaatccaagcaatacaattacaattacttcaccaataatctcaaaaaactgatctttcgatactaaagctcaaaactttaaacaatctccaacagattaatcaccaaatcatgaataaaaaccaaacccacaaacctatgaaccctaaatcaaaacgaaaaagtactatacaagacaaattcgaatcctttcagatcaaaaacccaagaacaatccattaatcgaaccccagatgtaaaaaacctaagtccttcgatgaacaat

SEQ ID NO: 50972 - DNA, 636 bp, Arabidopsis thaliana columbia
  unsure (1)..(636): unsure at all n locations
ggatttgtcgaccaggggttgaaatcgtcgaccaggtccgagacttcatcgaccgggtccgaggaatcgtcgaccaggacgatgaatcgcgtcgagagaaaaatcctatcgttgatcgatagagtttctcaaccaaagcgttgacatcgtcgactaagtccgacgtgtcctaatccaatagattgggaactaccctgtacttttcctaacagagggttaacctgaatgcaagaagttgttctaacattcaattttaacgatgctctgatgaaactcgcatacctgatccgttcattctcgtctgcagcaactacaataggagagaatgggtgaaggagggctgtctttgttcccgtttcaaaccttgtatcccagttggcaataggattattgttgagcttgctaatagctggtcaaggtaaaatgtaggaagtcaattcaggcgactagtataggtatagaacaaaccagagataacagacaaacctatttacaagagtgctggcattttgcaatatgctcaagtgcgaatttttctttctcttctcttttggctgcaatctcttgactagcatctgcacaccaagaagtggctctagaaagtgccacnactccagcngtagatagttgatagtg

SEQ ID NO: 50973 - DNA, 535 bp, Arabidopsis thaliana columbia
ggtagccatggcttctcagtagaagcaacatctacactctctttcaaagctttagcagattgtgtgtgacgattcgacgaaggaaaactcggactatagttcgacgcctttttcgcagttatcccgcttttcgttgaagcaatatgatactgtgatgaacaatgatcatttacagatagaaacttctctgtaacatctgagtgataaaacgatgaactcaacaatcttttgccagtgttaagtcctataacagctgcagtagccattatataacactcttttgcactcaattcatcaataaaggaacaatctttgctcttcaagatcgtattctgctaacaaaaatcaatactttagatatcataacacaatttcagacacaaagaatcaatatcaacttgtgggtattgaaaattacaaaagttaataacgtaatccagcaaaagaattgtactttattctagttctgagctcgaagccaatcattactagccaaatttgactaatccattgaacccaattaagaagatgaaga

SEQ ID NO: 50974 - DNA, 529 bp, Arabidopsis thaliana columbia
attagtaatttaattactgtttaagtcgcaaactcgcaacaagacaatagaagatgaacaagtgggggagatagacttgagttgggccttgttttcatgcccaataacaattgggtttaacggtattacgaagttgtgggctcaaaggctttattgattgaagaaaagataggagacgtgtaaaatgatgatactcaaaatagaacttcaaacataaacatttatcatatctgaaaaatctcactacgtactcccaacataaacgttaaaaaaaggacatttgatgtaagtttattatagagtatgatttttttatatattttttggtttactggatttgagaagagaccgtaactaacttgatgcacaattgctaatcatatccgatacaaaaacacaaacactttagttcagggctggacctgtgtaacagtgtaagagtatgatgaaccattcttccgctgcgcgattacattcatagtgtcaagattgaatagagaaatgatcaaagaacttcattacaaagagt

SEQ ID NO: 50975 - DNA, 533 bp, Arabidopsis thaliana columbia
gagagctataaacatgggacgaaatctaagtagatcgaactaggaacgaaacaaacagatcgaatcggaacagagacataagatatgtcttatatctatccatcacagaaatctagattcctcaatagcatcgacaaaatccgctgcgaaccagaatcgaacaattacctcagttattattatgcgcgaaagagctacgaaaagcgaagacaagtatatgccaaatagcttcagctgcgaggaattgagagaaaatgagaagaaagagaagaagagtttcccttcctttatattataatcggccaacaaacacacaagttgatgatatctatgaattgcgaaaatgccattctcggaatttttactaattttaatggaaacaaagagcagccaacctgtttaccttttggccgttactaaccattttttgtcatcatctctcttttcgctgtttgcaatttgctttttaattatttctttcttctaataatcaactttgttgttgttcttagcccttaaaataagttatcact

SEQ ID NO: 50976 - DNA, 628 bp, Arabidopsis thaliana columbia
taaattactcaatttttaatcatacaaaaaaaaaaaattactcaatctttaacaaaaactaaaataaaataaaaaataagaataataataataataatttctcaatctttaatcctacacattatcaagaaaatattggttatcatatgcaatgaataatttggtttaaaattttagagacatagtatttatcttccaagtgtcgttagatcaactggtaatcttaggaaaagcttagagatcgtcggttcgagtgtcgcttaggaaaaaattagtaaatgttgtagtgtactaatctgggaagattacgggttttggtacagaatctcctaatatttttttaaaatgatataaagtatttattaggcattcttcaatcaccacacgaaatgtgaacctaaactatgataaggtttttcgaataccctttttccacatttatcaatttaaaatctctcggaatcagcattaagcataagcatgtctggcccaagtggatacgacggtagagtggctgtcctagaggcccatcatgattccaaaaaaagatcttatgtacaagtccatttctaagagaaatttagaacataaccataagacctatcatttatatagtactggataaggt

SEQ ID NO: 50977 - DNA, 840 bp, Arabidopsis thaliana columbia
tatcttcaataaaataaacgaattgaagacgagtatatcgctatcatggcaggttccaattagttatctccatcctcttttttgtttccacaaaggagccactttgtgttctttatttttgaaaatgtttgattggttaattaaccaagtgaagttgtaatactattatgcaagaattaattgcagcactctatgggtttcgtaaattggttaatagtttaatgggcctcgtacaagtcagcccattggatatatttcagattaatcgggtcgggtcacaaatgattatccttgttgccttgcctttgccaatcgtttgtttccaaaataaaaatcatggcgagacttttcgtctctatccctatgcaacccacacaaataagcttccctgcgtcttcttctcagccactattatctccgccggcgaacaatttcaccgatggtggagctgggggattatgtcttacacggagaatcagagacagttccgtggtgacgcgagcagggcctagtacgagcagctacttgctcgcgttcgccattcctgctactcttatcgccgccactgtcttcacttcaatcaaaatcgctgacaaactcgacgaagatttccttgaggatgtaagatccttcaatcttcgtcatatctaattcagattcgatttttgtctagctctctagtgttttaccttgctttaggtctagtttgtctcagtcttagtttaggtaatcgtggttaagcaaattttatttgggggaaacaattaagcaaatgactaacttttgaattttgggttgaattggttcaagttgttgaattaacggcatcgttagaaagta

SEQ ID NO: 50978 - DNA, 878 bp, Arabidopsis thaliana
ccaacaatatgtttcctttcttggagtttccttacaatctcatacttgtgctctacgcaagatcatagaattaggttagagacaaaaaagggacgaaaagtgaaatagaggatggttactctaccaggaaagactccagcgaatccatcggccttctcaatgaggctcttcgacaggaactcctccggtggtgtcatctttgttttcaagtaaagaagaggaaggatacatgtttgttcccattccaagcctacgacctgtctctttaccaatagccaattgatctccagtgatcattttaacattcacaccaagatcaagagctcttctaatggtctctgcactgtcatgtcttggagggtcaaagagtggcaaaagaccaacaaactcccacggtgttccggcgctttctttgtccttctcaggaactctctgacgtgcaaccccgagtgaacgtagaccacgctcagcaaacttgtcaattatctcatgtgctcttctctttgtttctcctttgagatcacagagttcaattatctgctcaggagcacctttgctacatctatgccactctccattggtatcgatgtaagtgatcgcggttcgcttttctactggattgaatggcaagaaatgcacttcagttattccagctcttgcctcttttgggtcacccaacatgttaacaatggaagtatcaatcgcatcttggttctctactcttgaagccctagctgaaagtagtatcacatagtccttgtctacgtctttggagaatacctaaagaacaaagaaatccacaagacatgaagcttctaacgtaaccaatttaaaaacaaattatgatgatgaagagatttgtcttgaaacctcaatca

SEQ ID NO: 50979 - DNA, 547 bp, Arabidopsis thaliana columbia
gatgaaatttcgtttgatctgatttattcttaagcctttgattagcttatcgttcgtgaagcggtgaaaatgccggtggaggtagagagagaccaaggagaggtgtcggtgaaggttgattttgagaatgcgactgagattaaaccggagtatgttgtttcggccaccaaagaggacgtgatgaatgggatcagccatggtggtagtaataatggcaacgggaacgataccgatggttcttacgatttcattacggagaatgataccgttggagatgattttgtagagtctgattatgttaagcctgttgatgatgccaatgtggagaaagatcttaaggaaggagagaatgtgaaggtagatgctccaagtattgccgatgatgatgttttgggagtttctcaagatagtcaaaccctggataagtctgagctagaaagtacagatgatggaccagaggaagtcgttgagatccagagtcggaagttgaggatctcttgaaaaagtgtcgacagcagcacctggtaatgggcactagaaagtgggc

SEQ ID NO: 50980 - DNA, 921 bp, Arabidopsis thaliana
ttgctttatcggtttggaattttggacataaaactcaaaaaaggaaaatttatcagactgtttttagagccatggattgttcttataatcagtgatgatgtttgtttgtcaaactggcacaggggtgcaagagcagctgtatgggaaaacttcaaagacaatccgctgtttgacatctcaacagagcacccaacaacatattatgaggacatgcagagagcaatcttctgcctatgcccacttggatgggccccatggagtccaagactggtggaagcagtgatattcggttgcatccctgtgatcatagcagacgacatcgtgttaccttttgcagatgcaatcccttgggaagatattggtgtgtttgtggatgagaaagatgtcccttacctggacacaatactcacatcgatcccaccagaggttatactgagaaaacagaggttgttggcaaacccgtcgatgaaacaagccatgctgttcccgcaaccggctcaaccaggggatgcgtttcatcaagtattgaatgggttggctcgtaagctgcctcatgagaggagtgtgtatctgagaccaggtgagaagctgttgaactggacggcaggaccggtcgctgatctgaaaccttggtaaggaccagtgttggaatttgattgaatgagctattgtttggttggtttctgtcttctcgtgtctgtattttgtagaatcataacttttttttgctatgtagaagggaaaaagctttgtcattgtaatgtaactagaatccttttgacatctcacgagaaagacaagtaaaagaaaaattattgttctcctttcgttttctgttttcaacattcaagtgagagagagaactgacatagaaaagggcaaaacggtcaattacaacgttgggcgaaaataagtataaga

SEQ ID NO: 50981 - DNA, 626 bp, Arabidopsis thaliana columbia
atctgtctcattggttctgacatgaggggcaatggctgtcgcttccaagaatattgaggtggttgctccagagtcaaggatttcgcagcaggtaagaaacgatccaacatgaattgaggatcctcagatggcattgacggtttcattgcctcaacaccaccaccaccacttatgctttgctttagagacaatgtatcaagggcatcagagaaaacatcatcatcttcactctcttctgcttcttcttctacatgtttactctccaagggagaatccggaacctgatctaaacccatgtcttggacaagaactgaaacagaaagagattcacttgtcttggactcatcagtgagctgctttggcatgtttctgcgtacagagattgcagattttttcatcctccttgttgaaagaagaggtgcatcgaagttaagttgtttctccgccatagaaccaaccaaagccgttagagaagatcagagatggactgacaccaacttatttttctctgccaaacttaatgatgttcacagttctccaaaacagatctggaaaccaaaacataaataaataagtcggagctacctagattccatagtagttgactaatttaagtaattaattat

SEQ ID NO: 50982 - DNA, 560 bp, Arabidopsis thaliana columbia
  unsure (1)..(560): unsure at all n locations
tcatctgatgaaaatgatgagaatgccaatcaacaggtactgttatgtgtttgaagtgttctctgttgctacaatactttgtgatgtgcttcattgagattcatgttaatgtaggaacagggttcaattcgaaagccaagctttggacagatgcttgctgacggtatgcttttgaccgctgcagttttcatggtttttctttgcatgtattttccatgtttcttgacttggtaaagtttccttgaacagcaagttctcaaagtacgactggtgaaatccaaggttcggtgcccatgaagccggtagccccggggactaatctgaatatcgggatggacttatggtcttcccaagctggtgtaccagtgaaggtgtgaccaactcctcatttcaccctgcaaggttgcttttccgaattcgttacattcttccttacaaaatcctctgattactcaacaggatgaacgagagctcaagcggcagaagaggaaacaatctaaccgtgaatccgctaggcgtcntagattgcggaacgaggtaatatgcatttgtgtgttagt

SEQ ID NO: 50983 - DNA, 559 bp, Arabidopsis thaliana columbia
tcgatttggtttatttatttttgatgtcatgaatttatttgctcttctataacaggagtttgttgaggcagcgatgacaacgatgaggcaagttgtaggaattgctttggtagattcacagaacagtataatccaaaaagcttatagtgtggtatcatcttgtacgcttccagctatggagtctattcctttgacctttgttgcattagagggtctacagcgtgacttgtcctctagggatgaattgatactttcactatttgcatcagttatcatagctgcgtccccctcagcatccattccagatgcgaaatcacttatacatctgcttttggtaacacttcttaagggttatatcccagcagctcaagctttgggttcaatggttaacaaattgggctcgggttctggtggacaaatacctcaagggattgtccttggaagaagcatgtgctataatatttcacgcagattttgcatcgggaaaaaagatttcttctaatggatctgctaaaattatagttggaagtgagacaaccatgtcaaagatatgtttagg

SEQ ID NO: 50984 - DNA, 1088 bp, Arabidopsis thaliana
aatacacttaatattttctcctaaattttctcaacgaattaattacaaaataatgtgtataccaagtaaaaagattctacttctcagtgacagcagaactaatttattcaagggtagtttcggaataataaaaaagcaataaatctctttttcctataaaagcaaagagacactcaccaaacaactcgtccctgaaacctctcttcagaaaactcaggcaccattttctccttccgccgccgccatggaatcacttccccagccgcaaaaccaatcatctccggcaacaactccggcgaagatcctccttgggaaatacgaactcggtcgtcgtctcggtagcggaacttcgcgaaagtccatttagctcgatcaatcgaatccgacgagctcgtcgccgttaaaatcatcgagaagaagaaaacaatcgaatccggtatggaaccaagaataatcagagagatcgatgcgatgcgtcgtcttcgtcatcatccaaacatactcaagatccatgaagttatggcaaccaaatctaagatctatctcgtaatggaactcgcttccggtggtgaacttttctcaaaagtcctccgtcgtggacgtcttcctgaatcaacggcgcgtcgttactttcaacaactcgcctccgctcttcgtttctctcaccaagacggtgtcgctcaccgtgatgtgaaacctcagaatctactcttagatgagcaaggtaacctcaaggtctctgactttggtttatcagctttaccggagcatctacaaaacggattgcttcacacggcgtgtggtactccggcttatacagctccggaggttatttcacggaggggatacgacggagcaaaagctgatgcgtggtcttgtggtgtgattttgtttgttttattggttggcgatgttccatttgatgattcgaatatcgctgcgatgtatcggaagattcatcggagagattatcggtttccgagctggatttcgaaacaagctaaatcgataatctatcagatgttagatccgaatccagtaacgaggatgagtattgaaacagtgatgaaaacgaattggttcaagaa

SEQ ID NO: 50985 - DNA, 504 bp, Arabidopsis thaliana columbia
atcaataatgttcatctcgtcccatcttgattaaccatatcaagtttccgctggacaccactgccaaaagcggcatttgactttggggaaacatagctattgaatggcttagcattggcaagagacactgggtaccgtttaactgattggtgctcgaatgatcccctaggcccgactatatgacataaacaaaaaaaatggattgtaacaatctcaaaacacatataacctgacattggtagtcaacaaacaatgaaattaccaggcggaggagttcttgcaacagaaggcttgggacgaagagatggtgggacataaaagcaactctgccatatgagaacggggttagataaggagtatagctataacagttgtcgcatatcgtccaatcaaaaactttctaggtgtacctggaagaacgggtgctgcagcactctgcagcagtcggtctgctggatggatccacgagcaaagtcgctgaatgatcatgtcacaatgtggaga

SEQ ID NO: 50986 - DNA, 438 bp, Arabidopsis thaliana columbia
ctgagccaggaacaagttcgatggagcgacaaagagaagaactgtatgtttcgagtaccatggaagatatactccatgtgcaactcacagaacagtctcatctacaaatagagtttgatcatcaacataaccaatttgtagctgaaatatcacagcttcgtgcatcatatagtgcggtgacagagagaaatgattctcttgcggaggaactatcagagtgccagtctaaactctatgctgctacaagctcaaacacgaaccttgaaaatcagcttcttgctacagaagcacaagtggaggatttcactgctaagatgaatgagttgcagcttagcctagaaaagtccctgttggatctatctgagacaaaagaaaaattcattaatcttcaggtagagaatgatacgttggttgcagttatatcttccatgaatgatg

SEQ ID NO: 50987 - DNA, 581 bp, Arabidopsis thaliana columbia
  unsure (1)..(581): unsure at all n locations
aaaccgatgacctagtcctaggtttgacgtgtctgcacgtagacagcgtttgccgaggagacaaacccagcggtaatggagccagtaaggacaaagagaacctcagaggcaccagggtgagtgtgcattgggatcacacctttaggagctaagtcaagtctagctgtagagaggcctagaccgttcagacccgggaactgagctgcgaaacggggtgtgacagcggcgttgatgatgtttgtagtgtttccaggagtgcctaagccagagaagacaaagtctgtagctttgacatgaatgggacgaatgcaagggtaaccgcagggtcttcagcgcgtttcaggtttgcgacacagaaatcttgaacagaggcattggatagagcaaagagaagagataagaggaagatagtacgcaacattttgaatggttggtttaagaggaagatagtactctacttttcttttcttttccctactcttctcactcctctcggtctcgggtgtttatatagagaggtgtgggataactgtgtggtgacattcgaaagcnggagataagcttttagaaacattatggac

SEQ ID NO: 50988 - DNA, 559 bp, Arabidopsis thaliana columbia
gagaaccatatatataacctaaatttctagaaaataagtttttaataaatctagaaattattattacacctaactattatatagtataattatattttcacatttaaagttaggtctgattcttaaaatttatagatttactcaaagtatagtgttttaaattttattatttagtgtccatcttatgagttgtattctctcacaattgtcaacacaaatcggaaaaggaaaacaataataagtaagattttacaatggtgttttgttgaagtacaaagaatatcaaatattctatcccaagcaaaaagatttgaaaacaataaataataatcaatatgtaatccgtagataatatcaacttatcatttcatcttcagattttttttctcttttttttttgttacattaaatcaaatacagttttgttatttaaattaacagagtacttatttttgacaaactttcaaaaactcttgattttaattttaattttctaataacactagtttagtacatttgtttggccaaacattagttcggtattaccgttttttatgca

SEQ ID NO: 50989 - DNA, 728 bp, Arabidopsis thaliana
atatattaatcaaataaagagtagatcattcccttatcaagataaaacataaacatgcatgagttgatacttttctttatataatttttccctaaaaacaaattatatattcttttcttcttttgctagctattttcttaattgtgaaccaaattatatactatttcattgtatatcaatagtttctttaaccaaaaaaataaaaactgtctctatgtatatatgtaacataatcagaccaaccttaaagagagagagagagagagagacatgttgactttccacaccaacgtgcgtccatgcaaatgagccctttctctttgccaaacgcacacgcagaaatcaacacatgcgtgtgcatataaagcttctgatcatacaaataaagatgcgtgtacaaaattataggtataggagcgagacacaagagaaatattaccaaaaaatggggacaaaaacccataattctagagggaaaatcttcatgatctatctaatcctagtctcattgtcacttctaggtttgatcttaccttttaaacctcttttccggattacttctccatcttcaacgttacggattgatcttccatcgccgcaagtcaacaaaaacccgaaatggcttcgactcatccgtaactatctaccagagaaaagaatccaagtcggcttccttaacatagacgagaaagagcgtgagagctacgaggctcgtggaccgttggtac

SEQ ID NO: 50990 - DNA, 526 bp, Arabidopsis thaliana columbia
tcatgataaagcattcacttgcttcggatgtatatagtgaaagcacattgatagacatgtatgctaagtgtggaaacctgaaagctgccatgaatgtgtttaagacgatgaaagaaaagaacattgtttcatggaatagcatcattgctgcatgtggaaaccaacgggaagctaaaagattccctctgtttatttcatgaaatggttgaaaaaagcggaatccggcctgatcaaatcacatttcttgagataatatcttcttgttgtcatgttggagatgttgatgaaggagtccgcttcttcagatccatgactgaggattatggaatccaaccgcagcaggagcattacgcttgcgttgtggatctgtttggacgagctggtcggttaacggaagcttatgaaactgttaagagcatgccgtttcctccagatgcaggagtttggggaacattacttggagcctgtcggcttcacaagaatgtcgaacttgctgaagttgcttcaagcaagttaatggatttgg

SEQ ID NO: 50991 - DNA, 486 bp, Arabidopsis thaliana columbia
aatcattcatagccaaaaagctccgttctctctcttgcccagaaagggcgatttcagaagccacggttatctctcttatctcttcatattttccagagagaaagtcgattgctctcatgtccctttctccgtcgtccggagtttttcggcaaggccgtccaaatggtttcaattggctttacccgacatccatggatggttggtcggtttctcttccgacatcttccggttctgttagcggagatggttggctttcgcccggcaaattctgctcccacatgagtttttggccggtttgctgtttttcttccaccgcaaatcagtttaagactgagttctaaacgttgtttctcttgtttttagtttcttatagttttttttaataaatgctttagatatgagttggtgatgaatctttaggtttgaggttttagagttacaagaattattaagagatggcgtccttggttgaagaaacgaagaatt

SEQ ID NO: 50992 - DNA, 608 bp, Arabidopsis thaliana columbia
ggtatgtttcatcatcagcaagcaggtggttttggctcttctgatcaacaaccgtcgaggaatcatcaacagtcatctcttggctattctcagtttggatcatccaccggaaactatgatcaaatggcgtcacgttaccatcgacttggtttttaagatcttctccgccgccaaaaccacacagtcctttgagattctctaataacgcaacgttttggaaccccgcggctgcggaatacgccggtgctcctcctcctcatgacgcgtcttctaactttttcccggcgttacaaccgccgcagattcatccgcagagttttgacgaacaaccaaaggtatatatttatagctacacgaactactttatttagatttatggatatgatctatataatttatatgtattggttggtcgtagaatatatcggagattagagattcaagtagcaacgaagtaaagagaggaggaaacgatcatcagccggcgcggaaaagagctaagagcgacgagctgtctccgtcaccagctttcaaggtattttgctttgatgatattattttttaaataaggggataataactactaagcgtctttttggtatgaaata

SEQ ID NO: 50993 - DNA, 492 bp, Arabidopsis thaliana columbia
tctgtaaagtctgttgtcacttgatctggtttcggtgatctcctctgtttttgacccccgttatgcaactgctatactagttgtatattaatatacattgacatggcaaggataaaaaagatggaatcataagaccgtgactatctgtttcttgtgttgaacactaatttctataaaaatatgtccttctgactctgtgtttgcatgctttcagatcaacggtcatacactcaaccgcagtagcacgaggaggacaaccaaaacttatgaataacacaaacacattgaaccctgaaactactcaaaacattccttttaatcatgcaacaatacaagcacaacaaagaaacctctcaggtacttttaatcactcatcctgaatccaacagcaatgtgtccaaactgacctctataaactgtaaaacatctatctacacgcagcagccaaaccaagcacattcatgggcccggttgacctttcgacaatggcag

SEQ ID NO: 50994 - DNA, 549 bp, Arabidopsis thaliana columbia
gggtaccgagctcgaaagttatgtgtgttgtgttctgtgaaacactaaaattcttcttgttttattgagatctattatgttggttgtgaaattattttttgtttttcttttcttgttaactctctgtattctgcacatcaataagaaaaagttttttttaacggaacataagaatgaatcttgttagataaataatattacatctatgtatcatcttgccaatttgtcatgtgatatacacaaaaatgaaagtcaagtgtctttttcctctttttcttaaataaagaaaatacaaaataggcatgggaacttgattgtggagctttgagggtgtatgcttcttataaatactcgttgtcttaatcatcaatctcttgaacccatgctaaatctgcagaaacaaaaagacagacacaaatcaacgactgtcgagataaccattctgtttccttgtcggatttatcatatgatgtctcaagatcatgagataagctcgcaataccttgtatacaagtttctacagctgcatttgggatggagaggccacta

SEQ ID NO: 50995 - DNA, 555 bp, Arabidopsis thaliana columbia
acaaactataatttaaattgaaaaccaaaaactatattattataataaaacttcaaaattcttaaactaattaaaaatattgattaactttaacagtttcaaccgtttttccatattttgaatgatctcaaaaaaatgtaaaaacactataattaatcataaagacgtcggtcaagaaacactgcttaataatcaaagtataccaaaaactttagaacactaattcaacattacaataaaataacaaataaatgtgcactaaattctttgcttggactttggatttttaatgatccattccatctaatggtaacatttcatttttttgtacttttaacaactcgaaattcatttataagaagatgataaaatgtaattcttcatgtaattgcgaaatttatttgacataggaatatttatttgtagatatcgaaatcactggtaaataaagaaagaaaaacattcatctcacatttcttcagagagataccaatctccaaaccaccaatctcatccctccttgccgacatagaaaactcattgttcttgtaaaga

SEQ ID NO: 50996 - DNA, 649 bp, Arabidopsis thaliana
cctccgagatatttatttttactggacacgacaaatctatcttaatgtattgtacagaaacaggtgatgctgatggagaagacatacctgaggatgaagcagtttgtaggatttgtttggtagagctctgtgaaggaggagaaaccttaaaaatggagtgtagttgcaaaggcgaacttgctcttgcccacaaagattgtgctcttaaatggttcaccataaagggtaacaagacttgtgaggtgtgtaaacaagaagttaagaacttacctgtaacactcttacgcatccaaagccttcgaaattctggtgttcctcagctagatgtctctggctataggtaaaaatactcttcatttcacattcttgtacaaattttctgcaagatttgaacctcagagagtattcaaactttcttttggttaaatagtaaacttcacctaaatctctgtataatttcccgacagggtgtggcaggaggtaccggttctagtaatcatcagcatgctcgcttacttctgcttcctcgagcagctcctggtaatccgtctctactgtttataacaacaaccagcatccggatttagacatacatatacagactataacagtaagttccatttgtaggttgagaatatgggtacaggtg

SEQ ID NO: 50997 - DNA, 459 bp, Arabidopsis thaliana columbia
gcaaaaatgttaagattataaatcatgaataaggaaatgttaattataaatgaattcagaaacatggaacaaaaaaataaaaaaatgtctcaatcaaacaaatgagtcctttttgtataccccttccatttttttctacctctagaattgtatgagaattttttttcatataaatggtaagcgcattaaacgcttttgcgactagcgttatagctttttacccacataatgatagtaattattattgctctgaattttactgctactcttgctcaagcttttactacgcagtaaatgcgataggcccaccacaaccacttattcctccgtggcgtaacagcagcagtcacgtgaccagcatgtgccttcgtcttcttcaccagaccccgaatctccggcggcttatagtttctgatcaacgtgcacttgattccttcgaaaaactcatgcctcatgata

SEQ ID NO: 50998 - DNA, 598 bp, Arabidopsis thaliana columbia
ccaatcctactacgaagatagcaaaagaaagagataaagaggtatctacacactagtaacagtccgccttcttgcacaggtggtggactcataagagagggcttcgcaaaattttgtctagaatacctgtgacacgctgctccagaactctctgcgtaaaatacacgaagagttggtatagcttatccatatgccgggttaacactacagtgtccaaattatcggtgccagttacctgaactaagatcgccataacttcatttggagtcgggaaaacagctgtaatggtcgctgcttctttgcgtacggtgtctacacataagaagtaacaaaatatatgaatcagcatagaagcatgtttcaagtattgcatccagatcaatgaccttcaaacctgtaatttccttgaataaagcagaaagtccacgggcaacattgctaggactaggctgagaaccatggtcaccaagaaccaacctaatgtctgaattcatgacttccacatcaataaacattggacgtgtaccacataatgttgcatacacttgtaccctgttaactgaaaacaagaagaaaaatctaagtacaagaccatatg

SEQ ID NO: 50999 - DNA, 586 bp, Arabidopsis thaliana columbia
gaggattctctgtaatatacaaactttatccactaatgttgatgatgcaagcagggaatcaaaattgcgtgcagaacaaaatgccacacatatccttgtccttataacacaacatggtgtcaaacaacaatcaacttctctataaacttactctacttacatcttcctcattcattcttttcccccacccatgcagagctttgtgggtgttcatattatgggcgtgtataacatatttgatccctgctcataaactttggggagccatggactgctgtgtcggtcttctgctgcaaagtggcgttgtgcgagggatagttcttctcctcagggattgtagcgtaggaatatagtcatagctaaaatggaactacataaggaagagctgtgatatccgcagactctattctgaaagcttggttccagacctgcaaggattcgccagaatctggaggatctgttctcgccttttttaatttgatacccgactgaccaagtagccattcttggtcatcatcaatctctggcaacagctcccattgtaggtacatggagtatctgattgagatactttaggtcaggatga

SEQ ID NO: 51000 - DNA, 513 bp, Arabidopsis thaliana columbia
gcgtgtgatcagtttatgagctagaccccccacgaggtggtgtcttttgtagcagtctttgtagacttcccacgtgcggcttgtgtagattttatccaagagagcgggccaagtccaaccccaagaccgtcctctttcgtgtgtcacatgcatatttttctctataaattaaagtatatatcttataatatttttttggtgactaaaaattttccatttagaaaaaaattctgctatgtttctccagtcataaccaatatgccattatatcgtatcgtgctagctaacttgattttgtacagagtacttatgctctagcataagttgtatattcgaactagaaaataagattttggactaccgttacgcggtcgagcgagctgttaagaacaatcgttatagatgatgaaatgatcatgcagtatttcactttaaaaggtaatgtattgcggcgattttaggcctagttgtagttccgaccgtatatgatgacaatattagacgctagctatg

SEQ ID NO: 51001 - DNA, 958 bp, Arabidopsis thaliana
cgggatgctagtgaagttattatttgatgcagctattatgtgggtgttaggtagaataataggaaaatatccttgaaaggcgtttgaactcatatctaactctgaaattaacgaattaaagattatttttggcgtaccttccaaggaaacgatggagttgtgagagagatttacatggaccatagaagacagattacattacaactcgggcactcttcctttaattctattcttggaaatgtctaaccaccataatacttgtaagtccttgatatacatggggaactcggtgatgttgcagctcgacaaaagtagatgtgtcaaatttttctgaaccggtaccaaccattgacacactatttccggaaagatctaaatagtctagagaccggtaccagctcggtctttgttttttcatatatatcatataattataaaaactacaaaggaggagatatgtatatactcttttttgggtatcaaaagaaattcatatactgcgcttaatgatttataacaatggtacgggccaatcatactagcttgactcggcaattgtgcaagtcttgcgtttatgtatcgagtaccgaccacatatttgttccacactaacacggacacacgaggactaattaattatgttattggagactttggagtggacttgtttcacaaataatttaactagacgtcgttcttacttcttacgtccactgatatcgaaatcggtttgttctggagaacgcaagaagaacagtaatatatttaagtgttggttcaatttcaatttttcagaaataggtttaaattaaaaaaaattgttaacttataaattacgttaagaatgttgtctaagcctaatagtcattaaacatgattgagcaagacacatacatcacatcgaagatcagcatctgcgtaaagtaactgatcaccacgacaacgtcagagtgcagag

SEQ ID NO: 51002 - DNA, 527 bp, Arabidopsis thaliana columbia
ccgcttgctcgaattcgtaatcatgctttactaaaaagttaagtaaattactaagcgaaatattttatagagacgtctctggaaaaaacattcccaaaattggcttataaatactttcaaaaccacaaggccacaactcatcattcgcaccaaagagaagaacaaaacatcatcatatattctattgactagattaatttcttctaagtgcaaaagaggagaaatggagtcaatgaagatgaagctcatagtggtgttgatggtggctattgtggctttctccgccgtaggaaacgtggctgcgcagacagaggctccggctccaagtcctacttccgatgctgctatgtttgtccggcattgtttgcatctgttgctgctttggcatcagggtttctcttctaaaccaatctccacatttcattgagttaggttctaaattgttttgccttttactttcgtttatgtcttatggcatgagctttttgttatttgtatccactatttggactactatgtgttgtgtg

SEQ ID NO: 51003 - DNA, 600 bp, Arabidopsis thaliana columbia
  unsure (1)..(600): unsure at all n locations
caattgactttgcaatgtaaacacacaaaaaaacgtacatttccaaaaatttcagatacaaagaaacttggtatcaatggatttgctctctaaccggtctgtcttggtttggtttagctgagagtttgataacctaacggtccttgtaaaccgtcttgatctggtccgtttcttctagccaaagaatggcatccatgggaacatcttgctgagttcatttcctaacgtccttggcctcgcttccttatcattgatcccgaacttcgctctctctatagcttccattatatcttcccgtgccaccgcttctccgcctgaaaacaatcaagaaatcgctagtgtctgttaagccaaaaaccgcagcttcatcccaaaagatcaaacctgggaagcaaccagatcgaataactacttaaatcaagaaagggctgttaaaagatcacttaaagactgacctctacgagcagcaagcaatgcagcttcattgacaatattggcgagatcagacctacaaatccgggangtaaagaagcaaccagatcacatatgagaaatgcatcttcttctaaaggaacgtctctcagatgtatggccaagatt

SEQ ID NO: 51004 - DNA, 509 bp, Arabidopsis thaliana columbia
ccccaggttttttaggtgttgagctttccttttttattggaaaaatgagtttggttttggcgttggttacaagcttcaaagccctcagcatttcttcaacagcatcatcaatagcacggagctgtagcctgaagggcatgcatatatgtatatcaactccttgaactatccaatcccatggagtcccacctgttgctggggtcacactggatgaagtggaaggcatgctgggtattcgtgatatctgtacccggctacttttgactattctacatccacaaaaaccaagcataaatccttccagaagtactccaatacccacattctctgagaaaattgactgaatctgcacctcagcctccaccccatccccagcctccgcagttatgcttaacatctctacgtcaacagcaaatatagattccttcttctttttcttatcaagtgaattcggggtagtagttggttcttcttctgtttatcccggttacagtggaacctcttcaggg

SEQ ID NO: 51005 - DNA, 461 bp, Arabidopsis thaliana columbia
  unsure (1)..(461): unsure at all n locations
gatcgcccggagcttcagatctcaggtctcctcgtcgttcgttctgaatccggtgaattcttcggttctggtttatctttgcggcggtttcagcgagaaggacggaggaggttgaatgctgctggtggtggtatccatgtcgtcgacaatgcgccgtctcgtacttcttctctcgctgcatctacctctacaatcgaactcccggttacgtgttaccaggtattttgctccgactgacttacttttcggaatctctgtagatactactatctctcgcgatttgctacttagctcctcgttgaagtgcaagtggaacttgtttttatccttctaaattttgttgaaatagaaacattttcctccaatttgtagtctctagcgcgtagaacgagatggatgtattgatttggcaatttaatattgtatcatagttcatttctgcaatagagtgtanagatgta

SEQ ID NO: 51006 - DNA, 664 bp, Arabidopsis thaliana columbia
tcctatcgggatcaagagcatactctaccaatcggggtcaagaccagctccagttcgattgaagacaaaggggacaccaggcaatgcttcatcttcaggaccaggtcgagaaaagacaatcggtggtttatctaattcataaagcatgggagacggtggctgcacttcaacagcttcaatctcttcatctgtgggcttgagcctgaatataaaagtgtgaaagttttgtccgcgacgccacacatgtgcttgatagattttagactgtggaggggaagaggccatatctgtagcccaaaatgttaaccagcaggtaagacctctggtcaattggtaatttgcctcaacatgctccacaaacacaagtttggttccatgagcttcgttgtgtttgtcgatagcagtgagtgtcatctcacggatcaatacggcattgctttttctctcgctgatttcatttggagacttatccattgatctactacgaaaattgtaatcaaattgctcccatttaatcgagaaaccctaattgtcaacagaacagattccataatcagatttcaaatctcaaccctaactacagagaaatctaggggttttttcttaccggagttttctggaattgatagtgagacaacaagtactgtcgcaagtattcatcatc

SEQ ID NO: 51007 - DNA, 631 bp, Arabidopsis thaliana columbia
tcgactctatgattcggaactatttagtattttgtaatccatctaatttcttggtttttcagaactatcaaccgacagtggaatgcagagttcagttaataacatcgaatctgaattaagtgagataaggctgagtttactaatggaaatcgagaagagaaaacagacagaggaggctttggagcagatgcaaattcactggcagagactccgtgagcagatggctcaggtgggtctgttcgttcctattgatcctaccgcctccaccaacaacatgaatctatcagaagaactacgctgtcaactcgagattgcgaggtttgtctctgactctttaggcagaggtatggcaaaggccgaggtagagatggagatggaatctatgctcgaaactaagaactttgaaatcacacggttgtctgaccgtctacactactacgaggccgtgaacagagagatgtctcaacgaaaccaagaagccataggtagtagaaaatcactctcattcaccaaatttatccattgtcattttctatcgtataataaaaatctaatctcacaactctgttgataccagaggtggcacgacgagagaggcagaagagaaagaagaggcagagatggatttggg

SEQ ID NO: 51008 - DNA, 565 bp, Arabidopsis thaliana columbia
atagacggagacgaagagaatatctaaacccgaaggtgaagagatactttgttctgtgggttaatcgattgaaagaggaaactgaaaaaccctaatccatggttttcgcttctacaaattcttaggctagtgagagagcatattatgcctgacccttgcctctcgttttcttctacctactatcttcttctttctcgtgtctctgtcccctggtttgtgttgacccgaatttttctcgggtcggtttaacccggtgcaccatctacaaccgggttaaccaatttttaatttgcataaattaccaaaacttcatcaatgtttacctgaatatatgaaaaaggatttaaactttccattcgtacattcaagtccattaggattcttgacatagtattttttttattaattttgttttattctaatcatcaatcacgtttgcaagctcatgctatacttgctagttatcaattggttgtaaatgcatatcgtaaattaagtaggtgtatttaagaatctgtctgcgagcttgatcatgagatcttgtaaaaatgagatgtatatgtat

SEQ ID NO: 51009 - DNA, 620 bp, Arabidopsis thaliana columbia
atatttctgattaaagaattgatataatctggagtgattatgtcgtacatcgcgtgttgggtggtccttatctgaaccccaccttatatattctcatcgttaattaatcaacggtccggattgttttacagcgagatgcgaagaagaagattttttttcttttcttattccgaagtacaatttgtatcatatttaaaatacttataaattttacaagtaatcaacaaaattgttttacaggtatgataataatgattcagatggctgaaaaaacatgaaagggtcacgaacgaaagagagaaacattatactaacaaaaaaaaaactattattgagttatgatgattgatgatgatgatctctctgggttcaatatagtaaccaataaaaactagagctactatatcatatgtaacttgtgttgttgtatgttaaaacataagcttaagaggaagcaaagaggctcagaggaaatgtaagaaaaacacaagcatctagctttgacacacaattttaaagacttaaaaaacactaattggaatccttcttctctcgcatccaagaccattctgattcacagagatcaagaggcgagtttcgtcttcgtctttaatggttgt

SEQ ID NO: 51010 - DNA, 522 bp, Arabidopsis thaliana columbia
aaacaatcagataaattcttggatccttatacgaaagtctaaacatttacgagaggtaaagaagtacaaaccgtgagagaatctagggttgtctgaagattgagcgatgctttaagaagaaaacaaaactcacccatatcgttgtacttgtcatatcctggaaaggattgaagaaattgtggttctctgttttgagagtgtccatatcaatgacaagtcctaaatatttaataaattatgcagatggagacgatggtgatagaacctccgatcaattgagactatagcgattttgtttgcgtgtcaaacactgatactgctttttggggttttgtgagggttttttctctctttccaatcattggtgatgaaaacttatccaaagatccaagctttgcaactgttgaccagactttgatcgaaggttttgttcaaagacttcaaatttccaaagccatgtttcaaatcgacaatggcaacgacaaaaacataacagagatacaacattgcacattttattgg

SEQ ID NO: 51011 - DNA, 1074 bp, Arabidopsis thaliana
caagacaaattatcattctcgtacaaatgtcgtggtgccacgtatcgccgccacgtctccgcttatttgtcgaaccaaacattgtcacaacttcccgccattttttaagttgtctttcaacgaagcagaggaaactagggctaatccttcttagaagatcgtgggctttccttatcggcccattaatgaacccagttggtaactagggaatttttgaaagctttgttgtcgctgtatcttataggccaagcaaaagttgttagtaagttccttatcttcctcgacatggaccaatggaggtcttcaactaaataattaaacagtcattaaatgatagataacgtctaatttatagatgaatactacaatgtttttacctaagcgatatattgaaaactaaattacattaaccctaatcatccatgaagataaaaaagggataaattaagatcccttccctgtcattacaatgaagagatgaatcattccttgtttcgagaagagcgatccttacgatgacctccaaggatacgagagatctgaagacctctactgaaagcttgattaaagagcatacgcgtttggaactctgacacaaatggaaaccatgccaagaacgccactggcgtgaacagcaacagtcccattactatctcgtatccacgagctagggtcctcactgatccccagaatcctgctctatgaaccaccggcttacacgcttgcgcaatctgcaaacacacaccaagtgttagtcttgtttttatccacacacgcacaacatttccattttaataggactccagtgaaaagcttttttttttacttaccaagagcatcccccaacctgtgggcataaaggcaaggatacacacaattatgtcttgtatcgtcatgtgagccagtgtgatcaatatcacaataattgcgataaacgtcatgaatatcagccctttatcaccggaacatcagctgaaaactcgcgctgaatctcgccttcaaccgaaacagtctgagacaacaaacacaaaaacttggttatgacatgacgtctggggattaaaagagatgatg

SEQ ID NO: 51012 - DNA, 534 bp, Arabidopsis thaliana columbia
taacggaccgccagtgtgctctaaagtcctgccgcgatgcagatcccgagccactgcttacgcattgcgcacctcttacacgcttttcgacaacattttcctgtgggtgtggattgacattacaatcccgaacccagccatcagcacaattagcgccgatcctccataactgacccagtgggagcggaacccctacaaccggcagaataccgcttaccataccaatatttacgaagacataaacgaataatatcagcattaagccgccagccatgacgcgaccaaaggtggtttgcgctctggcggctatccacagcccgcgcatgatcagcagaatgtagagagcgagcagaatcagaatgcccactaatcccagctcttccgccagtaccgcgaagataaagtcagtatggcgttcggggagaaattcaagctgtgactgagtgccgtgcagccagcctttgccgcgtaatccgccggagccaatagcaattttagactgaataatgtgatatccgcgccgagtgggtctga

SEQ ID NO: 51013 - DNA, 167 bp, Arabidopsis thaliana columbia
taactaatttcggaagactctcagttttaagatatttcttgttgataaaccagatttgaagagagatttaaactatctttgatgaaagtaatgaaaataagaataaaaatgttggtctaaattaaatatttgaacttaaaccatatcatcttaatcgtataaggttt

SEQ ID NO: 51014 - DNA, 577 bp, Arabidopsis thaliana columbia
caaagcacaaattaatctttctatttgaacttttcaatctcagattaggattaataccaagcagagcacatctccacaatgaaaaaaaatcatagcttgacgtaaattagagatatatatatgtcaatgaaattatgatttcgaacataccacaggaagaaatgcacaccaactttgatggagacggagtgatcataaatcccgcaaacctcaagcagagctaatttcctgagctcggcctcaggacctgtctccgtcaaccatcctttgaaaaccccattctcaagcaagtaccagatccgtttcattgtgatctcacgctgctgctccatcgtctgattgtaatccggcgacacgaaaatcttacctcctctctccttccgattaaacagattgctctgcatcatgagtccataaatccagtcccgatccaccacgttgtgtccgtcaagtaattttctcatctccttgacatcgaatccatagctctcgttgagctccggtggagagtactgcaaacataactcgcgcgacagggacgggttcgaagatggaggatttgattggagtatgtgat

SEQ ID NO: 51015 - DNA, 522 bp, Arabidopsis thaliana columbia
gttttcttaaaatgcttatagatgatcagtgatgatgtgaagaacctattgaacatcgaacaggagtctgcagaggaaaagaggaagatggcgtacgaagcaactctgcttgccgccacattcagtcattccttggcaaaagaccgcgatggtgtgttagctacgttgaagaatcaactccatataactgatgactttcacagggaatgccagaatcgtgtcaggaacaacattttagtcgtccaattgactggagaagcatccggctcgaattatgtaggcgaaacagggtggacgactctcaggcgtatcagcaacaccatcttccgcttttaagaagacatagaagtaattttaatttcatctaagtagtaattaaataccgtatttcattgtctctgatctctgcgaccgaacatacatcatcgtcgccgttgataaatagattatgagatcctattttttctacataaataaaagatgagatcctatgtccaaaaatattattttcattttatatta

SEQ ID NO: 51016 - DNA, 559 bp, Arabidopsis thaliana columbia
  unsure (1)..(559): unsure at all n locations
nnnnnnnnnnnnnnnnnnnnctaaagcactggaatccatctcgaaagtctgtacgttagcccttgcgttagaagatgtcggcccgcagcggtacaggacaaaattggcgctgacccgaccggattgccctttaactcagttatcgccttagagttgcatggcggcaaaccgctttcgccactggtaaatgctggcgctattgccaccaccagcctgattaacgctgaaaatgttgaacaacgctggcagcgaattttacatatccaacagcaactggctggcgagcaggttgcgctctctgacgaatcaaccagtcggaacaaacaaccaacttccataaccgggccatagcctggctgctgtactccgccggatatctctattgtgatgcaatggaagcctgtgacgtgtataccgtcagtgctccacgctcctcaatactattgaactggcaacgcttggcgcgacgctggcggcaggtggtgtgaatccgttgacgcataaacgcgttcttcaggccgacaacgtgccgtacattctggccgaaatgatgatggaa

SEQ ID NO: 51017 - DNA, 498 bp, Arabidopsis thaliana columbia
tgtttgaattctcgagctgttggcagaaagacgcagcctacaccaaaaaccttgcttttgattggggttttcatctcattatactcggtggctttggacaaatctcaagtgttactccgtgagcatgttaagcaggctgttccatcaacatgggaccctgctgcattggcaaggtgatgttctgtcttcataataggattgtatgtatgtaaagtctatggaaagttacttacatctgcatatttttctgtgaaattgttcgatggtcgtttccttggcccaatgtcttttcactggatgaaattgtttttgtatgacttaagaattacgtcttacttgttgtaggcgttgtttcattagtaatatttcttcagtaattggagggtttatgactaacacttagtcaaatgtttctttaccaggtttatagatatttatgggacgcatataattgttagtgttaagatgggaggaaaagatgtgatttatgcaaacaac

SEQ ID NO: 51018 - DNA, 586 bp, Arabidopsis thaliana columbia
tcgtgctaaatgtcgattaagggaagctgagttgaactgtgtcagcacaaatatcttgttgatgcagctgttaatacagttactcatcgggatatcgatcagcctgtagcatccaccaacaggaacctaacataatttgaagacacaagaatcttcagtacacaaaaaaaaactgtttcataaataagacccttgaggtcctaattcgatgaatgttatttacagtttcggtttattcggtaagagaaaacgaagtaagatgaatatttacagctggtgttgcggctctcattgtaagagggaagagtttagctccattgcctcctcctagaatgattgcagccacattttgcgggtctacctttcttctctcaaacatggaagtctttactgtctgaaaagacaaagcaaacagaatcaagaactctggacttttccaggaatcgattaagcagtcttcttgaggcaagtcttaagaattttgtctaatgccatttaagagaaaagagtaaactgatcaacataccatagccttttttggattactgaagtggcacagcgtaaacacactgtgcttgacttttga

SEQ ID NO: 51019 - DNA, 1423 bp, Arabidopsis thaliana
tcaatcttctttccattttaaagcactgtgactacgagacataagcattctgtgaatttcatatattaagatggcctccgctttactatgttttagtttcttctgccattggttaaattttctaaattgaaatgtcttgtgttaacaactgaaattagtttcttaatatccctaccactttaaaacttgtcagtagttagttgtacacacttcattagaactactgttcctagcatgtttactcaaatcatgttgcatgattttgcaggtcttagcttttagggacataacgccccagggtcctgttcacatcctccttattccaaaagtgagggatggcctaactggcctctctaaggtacctatcactgaaacaaaatccagacagcaatcaaataaatgaactgctaaaaccatggcaattgttgaactcgatcccattttgaaacacaagctaaataatgtttggttctgctaccgcaggctgaggaaaggcacatcgacatcttgggccgccttctctacactgccaagcttgtagcaaaacaagaaggcctagcagagggtttcagaattgttatcaatgatggtcctcaaggctgtatgtatttatatatagttccacttcttcagttagcctattcagaaattcaacacctgaagaaataaagggacctcatgattgatgcttctcacattcttgtggtttttgtaggtcaatcggtgtatcacattcatgttcatctcattggaggacgccaaatgaactggcctcctggttaaagatcatcttgaagtggattgttgtcctgatgataagagggacgcttagagtttgctctcgtctactaatgtctctataaataaaaaaacgtgggacatgacttttatgattgttatgcaaaaccttattttatgttatgaaaaggatatttcactgttttctcttctggaatcttgtggttgcttttctctattattgactctgtaaaaattgactgcgtttaaaccagagcgccatctttaaggaagaataccagagagtagagacgcatgaattgaccttgtaaacatccacgacgtgttcatgagcttctgacataatattatatacaaacttggtagcggtcacgtctttgacatttttatgtctatatagaccacctcattgcctacaagtaaatatttggtggattcttaatttctatctgatcccagtttcacgtgtagacttttctttgtagtcatatctcttatcttagattccatttcccagttcataatttgattcatggaggacgaaaaaccaaggaagagcctgaccagcagtgtcagcagaggttcactcattaccaagaatccgtctagccgtgtgacggacgaacgtgagaacacgcactagacgggattgtcgatgaggaag

SEQ ID NO: 51020 - DNA, 457 bp, Arabidopsis thaliana
gaagcggccgccagtgtgctctaaagaagccgacaatctcattattagcacctatagattcaaagggtggataggtggctgaaacgccaaaattgattttctctgcggcagaagcaccgaaagtaaaggaagcaagtaaagcggcaagaactaactttttcatgatggaactcccgtctgtcaatcttatgatttttggccgtgtctgcggcatgggataacaatgccatcaagtgaatttatatgcaataaacatgattaaataatttaaatgaaataaaaaagacggacaacttagtgggttgtccgtcttcattataagaatttatgcactatgtaggccggataaggcgtccccgccgcatccggcacaggcaccgtgctgatgtctgatgcgacgctggcgcgtcttatcagacctacaaaaccccccggcgaatgtacgcagccacattaa

SEQ ID NO: 51021 - DNA, 501 bp, Arabidopsis thaliana columbia
caccataatactgatcaaaatcttattttatgtatgttagtaattttcttatacttcaaatcaaaactattttaattattctatgtatagtagtattttgttttgaccataagttccataacatttaatagctcagatctcatgaattttgaattgatcaatcttgtatatagtatatatgatgagatctcactgttttgtttaaaatttggcgtcttcatagtttggctcaacacaatttaattcttttgggggtaagctaacaaactcataatcacatatgcatgaaaaggtcatatcttactaagtcatcacaactcttgataagattacatttattacgagaaatatcaaaattaaattttacatcattggtaaacaaacagccaaaaaagcaatttaagaatccaaataggaccaaaagcaggaacaccagaagctttacaagcattaacaacatcacgacttccttcaggattgcttgtacaatcacgacttgag

SEQ ID NO: 51022 - DNA, 973 bp, Arabidopsis thaliana
agtttacgctaacaacaagacaatatattctcaaccttaatctctcgtgtgtgaagacaagacatagccattattattctagtactaaataagacaatatatgcctaataaatagaaaacccgtaggtgttttttggagtaaaaaaacattaagtgaaatttgttaaaactaaccaacaaataaattataattaagaaacaaaagaggtatgatattctgtgtataaactacaatataaactaaaatacccttattttttcttgttttttagtcattactctagtacactataattaccatcaccaccatgcgctgcaaccatcaccatcatcgcaattcgcaaccaccatcgccatgtcgtcaccagcactaccactgcaactgtcgccaccataccaacaaccatagcgctgtcactactacaaccatcaccatcatcaccaccgaaactgctacaccaccgcaaccaccttaatcacgatcattattaccatattgctactaccccgaccaccgtaaccatcaccaccgcaatcaccatcaccactatcaaaacaaccagcacgtcgttaccactaccaccaccatcgtcagtccgtcaccaccactatcaccaatttttgaatagttaataactttttcttttttttttatctagaacactttgtcctatactatttattctattctatataccgtttttcatttgaaaatatacatcattttcaatttttgagtttatacaagttttacacatataattatggtttgggtataagtttttttggtttagcatttagtatattaaattaaaattgatttatgaatgagttatgaaaaatagtacaatatattcttgttctattcctatacatcctaaatagtacaacatatttttacttacacatactattcaccatttcacaaatttacatctaatttttaacagatcagcgcggagacagggggatt

SEQ ID NO: 51023 - DNA, 581 bp, Arabidopsis thaliana columbia
ctgatagaacatagaagtaacagttacgagtacctgtttctcaatctcagctatctgttgcctctgttgagagggtggagtaatctcagctccaagaataatatctcggatctctgattgtgtcagagctgaggtattcacattgtttttctttgcgtagtcagaaagaataagatctctaagtgctacctccacctgaatttaacatgatcgtgagtaaggaaggactatttcaaaaaaagagaagaaagtaaaagctatatatcacataactcactagtaaataaaaacagcagatatagaatgtaaagagggatcctatcaaataaaagaatatagcaagaagaagtacttggaaagtggcagaagagttaccttcatccattgatcatcagtgagagagggccagatgtgatgtggctcagtgacaacggacttgtcaggcttcaacaacatcttagccttctcattattcacgtgaagcgcacgaaggatcaaaataagtcttgaaaaggcagtataagaagaaatactcttcaaccaatcatcatatatattaaccaagccatctgcggttctgt

SEQ ID NO: 51024 - DNA, 533 bp, Arabidopsis thaliana columbia
cgcctgggtttgcttctgaaatagtccagccaatgcatcagtcagtagaacagagtccaacggtgactcatttgctttccagatttccaacttagcagggaagtacccagtgttgttccatttacggagctgcgccatcgaaaaaggtccttgaactttaccagatgggtccttgtaatgccatattttctctgaatcatttgacttgggaacaggctgcgaaacaacagcaggaggtgccattgaaatttcagaggcaatcctaggagataattctggtggtgcaatagcacgagaacttctggcaggagtttcaggaattgaaacagatcttggcttctcagagcctaaagatggttgcacttctctttctctagctgaagtccacatactatcactaaccttgtcgtcagaactaccaagataatcccctctcccagtagaacctctaccagaataacttctgcttaactcacgatttgcacttgtatttgagtagttacttgtgccagtccatgattcattggaactaa

SEQ ID NO: 51025 - DNA, 563 bp, Arabidopsis thaliana columbia
cccgacaaatagtggaaatcgtgtaattcttactacactcaaataaataacgagtgaacgtaaacaacaatatgactattttgttaatgaacaagctaaacaattttttttttgtcaacacatgctaaacaattgcatagtgaaaaaaatgaggtgattttagttttttcaatgataataaatttggtattcattacatctattgaactatctctactctaatttggtttagagaattaagattcgccacaatattgttgcactaagttagtctcttgtgtaacaaacaaagcagggaaaagtaaagacacaaaaaagattacaaattcaggttccaatgtggaccctacataacatacgagaaattcaccagtatacttgctcagcactcaaccatgcttacaaatgagtttatctcttcctcacacttatattcgatctcaataaaatggttcagaaccttttgaatccacaagagactttgatttgttcaagccatgatctcacatcactaagttcctcgtctttgtatgttctttgatgaagccttggtaacagacttt

SEQ ID NO: 51026 - DNA, 345 bp, Arabidopsis thaliana columbia
ctggtggtgcagagacgaatcctctgttttggtttaagagatggagatagaagcaagcagacaacaaaccaccgtaccggtttcagtcggcggtgggaattttccggttggtgggttaagtccgttgagtgaagctatatggagagagaaagctccaacggagtttgtcggagacgtgtcagcgaggcttacgtggcaagatctgacggtgatggtgactatgggagatggtgagaccaaaaatgttcttgaaggtcttaccggttacgctgaaccgggatctctcacggctctcatgggcccttccggctccgggaaatctactatgctcgacgcattagctag

SEQ ID NO: 51027 - DNA, 667 bp, Arabidopsis thaliana columbia
cttgctctgtaaagtctcttcttcgaaccttcaagatcaaaaatcagctgccaaggagctaagacttctgaccaggaaaggcactgagttccgagctctttttggcgaatctccggatgagatcaccaggttggtgaatcccttgttacacgggtcaaacccagatgagaagcttcaagaagatgtggttacaacattgttgaacatatcaatacatgatgacagcaacaagaagctcgtctgcgaaaatcctaatgtgattcctctccttatcgatgcattgaggcgtggaacagtcgccacgagaagcaatgcagctgcagcgatcttcactctgtcagctctcgattcaaacaaagtacttatagggaagtccggaatcctgaaaccgcttatcgatctcctagaagaagggaatccattagctatcaaagacgtagctgcagcgatcttcactctttgtatagcccatgagaacaggagtagagctgtgagagacggagctgttagggttttaggtaagaaaatctcgaatgggttgtacgttgatgagcttttagctatattggcaatgcttgttactcactggaaggctgtggaggattgggtgagccggtggggttcatggttgctgagatactcgagagacgagtcaacgaacaagaga

SEQ ID NO: 51028 - DNA, 531 bp, Arabidopsis thaliana columbia
aaagaaaatctaacggatatagaaacaaaaataataatctaggaaacaaatcgtaatcaaatgtccaatttcaatagtgtgaatcatgggatgggagagtggcgattttatttctgtggaagtgtggaacctccaccgaaattgagtaatggaagctcaaactccactaaaatctttactttttccaaatcttccaattggctttggaattttgttggctttggaattttgttgcttcaatattcttgcataggcttagaatttaataatagacgcaagatttataaggcctatcagaaataatggactctagtattataaggcccataagaaataatgaactctagtattataaggcccatcaaagataaacttgggccaacaaataataagcagcaaaactgatacataaaaaacagtggtggtttcaaactgcaaagagataagtctcttccttacatagtaaaccgctctgttcctcaactgaagttaacatgtctccctgttcctccataacttcttcccacgtaa

SEQ ID NO: 51029 - DNA, 558 bp, Arabidopsis thaliana columbia
tgactcaaccaaaatgaatttgttaaggacaaaaaacctgaataaggtcaaactgaaatcttccttcaattgtggtctctttactttctcttattccttgttgtctgaaacatggcaatataatattataagatgcgagtttagagaactcatgaggcacaaaaagcatgaagcataacaaaaaaacaatagagaaagcgatggaagttagcaagcaccagttactcctacatcaccttgatgaaaatgttgagtccctgacccggaccctactgttctttacacgaccaagaagaggaaattcctctattcccagtgtagcagctctctgagaatcagaaaacagcatattttctaggttaaagatccatcacatatacatgtgccatatgacccagcggacgatagcataatattacatatagaatgctataagaaagaaaaacacgcttctgctaaccagaggtgatactgatccgtcaataaaagtagaatctaatgttcaagtacctcaatcagataaggtaaatcgaatttgcagatgttataacaatgatg

SEQ ID NO: 51030 - DNA, 619 bp, Arabidopsis thaliana columbia
ttttcgccaacaagaaaaaggacgaggaaactaaattggttgagattaacactttagtttattggttggtccaagagttggtagatttctttgtcgtttctctatagttggaacatgcatttatgtgaacttcgattatgacgatatgcatccatactacatgtaaaatttattgttgttttccgccaacaaaagaaaaacgaaaaagctaattaaattacgtacgagtaaattgaacacttggagaatcacatggatcctggagctctgctcatgcttaggagtgctcgaggccttagatctttcctatatgtagacgttgatccttgtgatctaaaaggtttcgaggtcttggaaatctatcacccgtccatgtctgatggctttgtgaactcggtaatggtcgcacgcaaactcactgatcgattaattaagtacgagtggtgtactggaactcgatcactaaattcattaaaaaaaacaaggcaagtgatgatccctaagaaattaggtcaagattggagccatacttgtggaacaaggcagatgatgattccctaatgaggctctctgctctccttactagtcaatattagtcctgcttttgtcacgtgttgcg

SEQ ID NO: 51031 - DNA, 496 bp, Arabidopsis thaliana columbia
cttttaacttgtttgtgtattgataaaagaagctcaaacccttttaattactgttattttttgcatagacgaaaaacatggcatttatagaagataagaaatcgaaggtttcattcacatcaaagaagaagatatcgctttggcctatataagtccgacaattatacaaaaatcgattcggagatacaatcatatcaatactatatcaaattatcaatatactataactacgtacatcttatgagggagaacaaaaaaaattacaaaaatacaactaacagtgtggctcgactcgagttgttgattgatatctttcccactttgtcctttcatttacaccatttctcatctgcaaaaggcatatacatagtaatttagattttatgatcgataaaagaactgaaaaaaaaacgtaaatcaatatcaaaaataccttgtaattttctacaacactttccaacaaaagcgagaaacacaacgagcaagatgattaagg

SEQ ID NO: 51032 - DNA, 549 bp, Arabidopsis thaliana
cgcacttgtgtatatcaaacctgtgcatctagtggtatgtgaagtatcaatgttaaagattgttgtcggtctacttaatctacaagtaaattctgaaatggtgtggcgtgttgtgttttatggatcagtggagtcacacgtgtcagtttcttggcgaacaggaacttgagaagctttccacaaagcacttgcttagaaccacgtgtcagagactttcgtgacacagtcacaatcatgtgttggtctagtaccttacgcgtgataccacgcgttttgacctatagttaaaagacagaggattagacattagtggctggatcaacaacgttaagaaacttcctctgttttattaaagcttcctcctgaagagggcgaaagactctagaaacagaaacagtatctataggaagaagaatgggtatttctcattacccgacagcgtctgaaggagtgatgccaatgctagtaatgaacacagttgtttcagtgtctctagtaaagaccatggtaagatctgttgtcacatggtgagctctgagaccaatgagg

SEQ ID NO: 51033 - DNA, 901 bp, Arabidopsis thaliana
caaatctttagcctctccttatgcttactagcccatccttctagctcttccctcacaagaatgtcatcctcggttctgtttgcgtaaaccacatacatctcggtttcgtcctctggatcactcaatatagattgaatgatctggtagataggagtgatgcctgttcctccggcgagcattgctagtttcttggcaaacttaggtttgccgctgaccaggaagttgcctttgcctttgtactcgatgtgccctagtggacctttgatatctatcattgacccgattggtaacgagtctaagtgttgagacatgagtccaccattgggaaaccttggatgaacgtctttgaagtaaactttgacgacgaggtcgatatgaccaaccgcgtcgatggcgctggtgggagtataagctctgagacagagtttgtcgtttatgttggcgcaaacgaaaacgtgcttccccacgggtaaaccaagctgttgatcttctgatggtaatgcgaatcggaacttacgaacgtcgtgcgagatcgaagtcttctcaatgagcctaaccgggattttctcacgtgggttgaccaaagcaatgttcttttgaggagttagctctttgattggagctaacaaaggaccaaagtttgaggcaccatgaactgagacgttaggggaagagtcgtagccagtggtgatgagttcaccgatacggtaatcttccaaaagcttcttggctttgtcagagtgaatggcttcaaactcttcggtgcaatctgtacctgcgtttatcaggatagaatctgtgcctcctggatgatctttcaaagaacgtgtacagtcatagatgtgaccgtggacgatgatcatgcagagtcagcagtgttgtgttttctacttcagagatt

SEQ ID NO: 51034 - DNA, 633 bp, Arabidopsis thaliana
tatgccgtttggattagcttttagtgcgatacacacaaaaagcaatttgttatccaaattctatcccgcgtttgaagtgtatactttagtcattggtcttagttctaattgacaattgagtaagtgcatttcgattggttttcataggaaaaatagagtaagaacaaataaatcaacataatccatatcaagcgaagaaacaaaatctaatgtagataaatagaagaaaaaaaacatgaaaagaaaaaagaattcataaaacttggagtttactaagataagtcaaagtcacactgcaccggttgaaacttaaaccctcctgtagaattagaggaaccaagaggaatcttaagatcatcacacttaatctttggtttaagcttccacgactttataaaccaaaacttaaacctaacacttagcctcaatttcgcattaatccgataaatcccagatttctcatcatcttttagatctgttctcgctccgtcgccgagcaccaccagattctgtccttcaattttggttaaaatcaccgtcgtattcttatgcccttgataaaacgacgaaacgttcgcagatccgaatctctgatctccgtaatagccactaaccgagaactcatcgtagtag

SEQ ID NO: 51035 - DNA, 976 bp, Arabidopsis thaliana
caatgttcttgaagcattaccttccttgggctgttcgtgctggaagacaatgcactgacctcatgtgtgtgtactatgagcgtcactttagtgaagacttggagcaagttcgtagaaaatgggaatcatccctgctcctcaacatcctaaatgacggttctagtttaatctgttttcgaatcacttagttatgccaaatctcttataaatgtgtagtggattggattaaaagttgtactcgcatttgatggttaataagagacaagttgggaagtttttgattcaaacattttttcagcaaaatattacagataagagttgagacaagaaaccgacttcttatcatttaaaggctcacatcaaacagtttcatagtgagataacgcagcaaagacaatggatagataaaggtctttgcaattattttacttgccaccagtgaagagataatccaaggatgatcctcctcccggagctgcgtgaactttggtcgaaggacggtcctgcagagatagacagagaaagggagagagtgagtgagtatcattaccatttcgattcacgggtattcgagtaaaacggacacgaaaacgtacagtgaggaagttgccggtgttctgtccttcagctctggcatagttgttaacaggagttttgataccagcaggaatctgcttgttaagctctgcaggctcaacagaagtagtagcagtcgtgagtgcggttgcagtcacagctgttactggtggtgcaggtccgttgttagactcagtaggagcgggacgaggagctggaactggcttaggagcaggagcgtcaccaccaaagagataatccaatgagctttgacctccaccacagctgtttccacgaccattgtataaaataaaacctagcacaacaaaccaaaacaccgaaatataataagaaactataacttgccaacattcagagatgatagatcagactgacaaag

SEQ ID NO: 51036 - DNA, 902 bp, Arabidopsis thaliana
ccaattgcctgagagagttggacagcctgactgtgaggtgcactgcttacattatgctgcaaaacataccttgtcttgagtctttccttatttggaaagtgttaatacagtagtttggatagttgatgcaccgtattgttttacttttctctgaagatgtttaacgaacattttcctcttctgtatgcattttctttgcagtattttctgaagacaggagcctgtaagtatggcccaacatgtaaatatcaccaccctaaagacaggaatggtgctggacccgtgctgttcaatgttctcggtttgcctatgcggcaggtaagattacatcgttgcatatagcctgcttttcatccaccagtttcatacttgatagaaaactttatatgtttcttctctctccagggtgagaagccatgtccatattacatgcagacaggattgtgtcgattcggagttgcctgcaaattccatcatcctcatcctcattctcagccttctaatggccactctgcatatgcaatgtccagctttccgtctgttggttttccttatgccagtggaatgacaatggtgtctttgcctcctgcaacatatggagctattccacgtcctcaagttcctcagtctcaggcctatatgccctacatggttgcaccctcccaaggccttttacctcctcaaggctgggccacttacatggtaagtcttaaatatagtttctcagtgcatagaccttgctttctctctgtgaagttacaataaatagacagagattctgcttttaacaaatttcactttcttttacaacattcctattttgcaatagattgtcttaatctgaaaattctctcttttcctttttaccgtggtgcagactgcatctaaccccatttacaata

SEQ ID NO: 51037 - DNA, 897 bp, Arabidopsis thaliana columbia
atgggacattaccaatatattttcctgggccaggggtaacctgggtttagtttaaccctatgttaacgggtcgacgcaaattacagcctatttagtttttttttgtattttttttttttcctttttaaatttcatttcatcttcttcacctttctacaattgatcccaccactactttttcctcctcaattccttcactcccccaacgatctccaccattaaaccaaaatccctaactctctgtttatcctacctcccatcaatcacatatctctccatcaccaccaataacataaatgatgagaattgaattgaaaaaaataaaatcaattacagtaaaagaggtgaaaacccgaacaagattgggattgtattcaggttgaagatgaggagaggcttatagagattatcaagcaagcgtcaaaggtatggttttaggaccaatcatcgaagggattgcgtctcaaagatctatgagcaaaaccccagatgaaattggaccaagttaaaaaaataaaaaataagtagcaggtggactcgaacccagaaatcaagaataaattgatttgggtgttaccaccagaccaaagcaatatcagcaaaatacttcgtaaacatattgtatatatatatatgtaaacatgtagggtcaatatttaacgccgttaacgacttccgtaacgcctaataacagatgttcgaaattaccaaaatttaaaagatcatgaatttaaaaggcaaccaaaaaaaaatataagtattttaattccaattttaaaactacaggtattaaacggccaaataagaagtaaccgcgattttttaggcttttttcccttttaataaggggagagtaatcttttcttttcacattggcccaatacaagtatgacaagg

SEQ ID NO: 51038 - DNA, 459 bp, Arabidopsis thaliana
ttattaacaattttcctaaatagcattgtatttttgttttctaagaatcattgtattttcggtttaaattacatattaataaagaatgaaaaacgaaatagtattaatcatttcagaaacatcataaacattattaaacaacaattatcgtttgttttaagaattattgatgatatgacttggaaaataacagcatgcggtcggaagtacgataacctcaaccaaaatgtacggagcaaatgctacaataagtgtgtgggatccaaccgtagaaagcagagatgagttcagcttatcgctaatttggattacatctggaagctacaacaaaaacaatctcaacagcattgaagctggttggcaggtatgctcaaaatttctatgtgttattttttcagtatatataatgactaatacatttacaatatatttcgttttattttaggtttaccaaatttg

SEQ ID NO: 51039 - DNA, 607 bp, Arabidopsis thaliana
cttttctaatctagtttggggaaatagaagcttacatgaatatcccacataaaataaacagggaaaaaaagaagagcccaacaagtgacattaatttaagatcttaaagaaaattacataaactttattattatagcaaaaaaataaaactcaaaacacccttaaaagcgcctagttgtccacatttttagggaactgagattgtctcactacacttgcaaaaaagacacgcaatggtctctagttctccggtttctccgtctaaggtatttctccatatatcattcaccttttcattttttttcttttcttattagtagcatgtgcttgcaggaaactgaccggaagtccggcgagaaatggacggcggaagatccatcacggccagccaagtggtggtactccaccttccacaccgtcaccgccatgattggcgcgggagtcctcagccttccttatgccatggcttaccttggctggtacggatactctttcgtcaatcatatttacaaattttatggcctatatgtgtgtaaaattaaaacatgcaagtaaatgaaaagtcaaatctatgcagatgatttataactagctgtaattaaactca

SEQ ID NO: 51040 - DNA, 581 bp, Arabidopsis thaliana columbia
tacttagctttaaagtcactgcgcacggctaaattagcgtggattttagtagattcttctaattgacgctaacgaatccatgaaattgaaccaattaaactcaatttgatacttttttcatgtacacaccactggttttgtatcatagtctctgcaaaaagcttacttatgatgatgaactctgctttattgtattcatatgatgacttctatatagaaactcttttcataataattataggattgtgtttaatgtgtagttaaagccaagttagtctatatgaaaatatatactaggttatgcaattaaggtaaagtctgctactataatttaaggtctgtttatgtgtcattttcactaattatgtcttttcttaaattacggctcaagctatatagccaacagttacactattactttttgtcataatctgcttatttaattctatggtccataatagtgtcagagagatcaataaacaatgatttagttactgtttatctgaagttgtgtaagattgttactattgcaggagttacttagaaatggagaagaggtttaaggtgtatgtatacgaaga

SEQ ID NO: 51041 - DNA, 548 bp, Arabidopsis thaliana columbia
ttgtgaaaccacttttcagccgtggcaattgggcgtccacatactcatctagcataaacttagtagagaagagcatcgaggtttcgtttaccctcaggacctttagagtaccaggaagaaacatattgaccatacacaacttccttgtaagacggtggggagagttgagaaactggtgctatccttgcagtcttggagggatcatgaaaggtagcgactgataaccgcgcccgattcgcattagtcacagctctatgttgagcacttttgtatcttccattggtaatgatctgcacaagaattttaaaagagcatgtcagaatcttctctctagcttgcattctctatcaaagagagaatagaaacctcggtttgatcggcaataagaatgagaatagcatcagagataggaggaacagtgagccattgagcatccttgtaaagctgaagaccttcaacatcatcttgaatcaagagagtaatggcaccaaaatcggaatgagactgaagaccaagagtgagctcaggctgaggacaaggagggtaat

SEQ ID NO: 51042 - DNA, 518 bp, Arabidopsis thaliana columbia
cgactctagagcgcattctaatcaaaattctgttatattcattaattacaggattgtctaagctaacttctgaatccagatcagcaatccgtaaaaactccttggaagtactctttaatattttgaaggatcatggccatatttatacacgaacattctggatcggcgttattagttctgttatatatcctatatttaacaacgtctggggcgagaatgatctgctttctaaagatgaacatagttcatttccatctacatttacttcacatcctagtgaagtttcttgggatgctgagacttcagctatggcggcacagtatctggtagacctatttgtccgtattattactgtgataaggtctcaactttcaagtgtagtatccttacttgctggtcttataagaagtccagctcagggtcctacagtagctggggttggcgcgttgctgcggttggctgacgaattgggtgacaggttctccggaaatgagtggcaggagatttttttggctgtg

SEQ ID NO: 51043 - DNA, 507 bp, Arabidopsis thaliana columbia
cttattcattaaaataacgtgtgcataatcaaaatcgggattattctgatgaaatagatagttaaattttatagcaaactaaaatctataagactaaaattttggtttttagaaaattactaaacaaaatacaaagaaagagggttgactaatatttaaaattttaatatcatcaataagatatagttaaagtcattaagtgtatagcaaaataaaaatttgatataaaacaaatttactagattagatatttaaaaaataggaattatcatttactatttaaaatttaaatcatttggtaaaaatttagaattatttttaaacccgcctgtctaggcgtgcctaacctagtttacataaattcatgttctttaaactattttgttaggctcattaagtaaccataaaaatttatctacagttttatccggcttgacacaatttctatttttcttaaagcaatttaaaaaataaaaaataataacatatacacctatatatatatat

SEQ ID NO: 51044 - DNA, 481 bp, Arabidopsis thaliana columbia
taaatttgggctacaagatttattggatcagcgtgaccttattgctagttttggatctagttcaacattggttgtaactagatatgtcaaagtgagatatctagctcaactcggctcatctcatgtcagaaacaaagctttacagacaagacaaagtccatttatttctgacgaacaaacaaaacattgtcacagcttgtacgaaccgatcttatttccagcagcaactaaaaccaaacggtaataaaacatttgtaagtttaaatctcacacgcgagcaacttcgacaagttgtttcccgacgttcttaccgtggaagagtccaatcaaagcagaaggtccattctcaagtccttgggatatatcctcaacatatgttaacttcgcttctcttacatgtggaagtatgaagtccaaaaacttggagtacctatcaaagaattcgacagcagcaagaccttgaacacggatgcgtttgtga

SEQ ID NO: 51045 - DNA, 912 bp, Arabidopsis thaliana
gatgcattttaacatgcatgttatttttccaattctcaacaaggattaaaaattacttatttattcatatgacatatataaactaaatgatacagcatccttattcagtgctggtccatgaatctcgaccgatattcatccttcataaatgacgtcaacacaccagaaatatgttagtattttctttttttgccttaaaagtggaaaccaaaatatctttaaaccttttatgaaatggcggtaaatccagtacgttaccagtctgatctgatgaaaagacagttttgcccctgaccacgaattatttgaaacttttattagccctgtcatatggactactagaaagatgcaacttttaaagaagacgtatgtgtccattcacttttatatactaattcacatccacaatttgatctgtcacacttcatttattgtaaagatgctgcaggtggttccaataccgtaagcaaactaggaaaaatataaaaatgttgactttacaaaattgggatatttatctttctagaagaaattttaacaagtatatatatgcgctatgcatgttgccatactctttagtatagtagtactaaatacataaagagcatacaaaaaaatatggaggaaacaaaaatgagtttgcttgatgattcttttacaagtgcaatgacacttaccaattcaggtgtgcctcaagtccctgatcgctacgttcttcgtccttcgcaaaggccagctcttggttcaagcttaggcaccagcgagactacacttcctgtcattgatctctctcttttgcaccaacctttccttcgatccctcgcaatccacgagattagcatgtcctgctaggagtttggtttctttctggtaaaataagtcatgctttatcacaagtccagcaagttttgt

SEQ ID NO: 51046 - DNA, 516 bp, Arabidopsis thaliana columbia
tgacttgtgaccgaggacttgtcaaatttacgggttccgatccatatgtcttcaactatctttagtttttccaaataagtaatttcatttggtttttaattctttttttcttctataaggagtgcctaaaacaaaccgtgaaatatatgtaaattatctctttatcttaaaatgtacaactaaaaatggtgaaatagttgactgctctcattcattgacggcattaacattggctaattcataattaataattgaaatctgcttcataatctctttaagtgcgatctcgtctttaagtatagatgtatgcgaaactccatcaatctctacggtgttcaagctatcgactttcaaagctgctaagctcgccaaattaaccgtcccatctccatctccatacttaatctctggttgcttatcgaatcctccttttccatacatcaaaacctccggtgtatcaactcctctcccatatatgcaagtgactggcactcccggagtcatcagctcctctgt

SEQ ID NO: 51047 - DNA, 423 bp, Arabidopsis thaliana columbia
gactctacctgcgagtcaacggactcagaagggatgttgtggtgtctatggtttggtagaaatttgttttctactaatttgaagcaattcttgtcactttttttgtttggttgtttgacatttatgtatgacggataaggattttggtgctactgggttatatgtcaagtggcgaacggactctaacagtgggtggtgaaatgatggtctcacactaaaagattaatcaattactgatttccggcatagtttaattcgataatttgatatattattgtttattacaagtttaaaactagaatagataaaataagacatgactttccgtagcatatggatgtggtagtaaaatacaattaacttttaacattacgttgatagtgtgattgatgattttggacggaaaataggttacaaagtagc

SEQ ID NO: 51048 - DNA, 476 bp, Arabidopsis thaliana columbia
tatacactctatcgacccgaactactgaagaggaagaggaagctgggaaattttgaatcgccctgcactgcaactgcaacaacaaagaaacaagtaatcgtcagaatctccatgagttctactgatgaattttcaaacacatctaaatcacattatcgaaagactgaagctcactgaaacaaattcgactccatttcaatacgataacgacgagagtataatgatttagccataaaataccaaactttttaaattgagaatctaacatttcagtatctcaccagcgtaagagtcgaaacacaaaccttagccatgagaggatgtagagacagaactgaagtcgaagaagaagacttagcagccgcaagtgagatggttctctgcattgagaatacactgttcgattcagacactttcaaatcatccgacgagtgaatccgtagcttatcataaatcgcgtagaagcagagagatct

SEQ ID NO: 51049 - DNA, 826 bp, Arabidopsis thaliana columbia
tggagagtcatgaccatcccggtggcgctgctcattcctttgagatcaaagggtacaagtttgactcaggtccttctctgttttctggtttacaatcgcgaggtcctcaagcaaatccacttgctcaagtacaatgtttctcttccttaaaactctttttttattccatatgtcggttttagggcttttggattgggatgaaaattgatcaaagtctttgtctttgggatttgtctcttatgaattttaggtgattgtgctttttttcaggttcttgatgctttaggggaatcatttccatgtaagaaatatgattcttggatggtttacttacccgaaggtgatttcttgtcacgaataggccctacggatttctttaaggtaaaaaagtttagcttatgttgctatgttgctttgttctagttacaaatgataatgaaaatgttagatgctctggtgaaccaattattgtatctctgatcttgttcagtgtttttttttttattcaggatcttgagaaatatgccggtccaagcgcagtgcaggagtgggaaaagcttcttgtgggtgcctatgtgtgaatataaatgacatctactcgtgagatctcatctgctaataaccacatgactatgatgaacctgcagggagcaatacgtcctctgtcttctgctgctatggcgttaccaccattgtctattcgcggggatcttggtgttctctccacagctgctgctaggtatatatcagagtaccttgttctatgtgtatagtcagtcatcttttcctaggtgttttttttttatcaatgacttctctttttttt

SEQ ID NO: 51050 - DNA, 131 bp, Arabidopsis thaliana columbia
gcaaactagtccagtgggaaaataaaggtggcgatgaattctctttgcaggatgaagtacctgttgaacatgacgctacagaagaaaaagtcgaaaaagagaacagttttcagcctccgttgattattgcc

SEQ ID NO: 51051 - DNA, 614 bp, Arabidopsis thaliana columbia
aattctaaggaaaatattataaatttactaagaaaataaataaaatatgtcagacaagacgaagtggatagatgttgcacatgggattctgttcaacgaagtctcaggaaaaaacatttgtttagtgagaggtcgtattacatgcggcgatcagtatcctgatcatatggatctccagacgtagctgccgtacacgtgttagatttgcacgagatctatttctaatcgaaccttttggatttagagaaagtccaaaaacccaaaaagctgtggtagggcccaaagtagagcccagaagacttttgcggtgtcgctttcagacaaagacattggtggagagccatgtgagtaggacccatagtacatcgaacacgtcactttaaacgccgtcgcgtcaccgtttatttttacacgtacgctgcacctgcaaactcctttctttttcatgttctttttcatattttcacggtaatggttattatctgcacgtgtataatcatttaccgccgtcaaaaaagttgttttctggtcaacgtaaaaagaaaattttatacacaattttacagtataaaaggagtaatgaacttctatgttaaaggtcgagaaaaaagatt

SEQ ID NO: 51052 - DNA, 753 bp, Arabidopsis thaliana columbia
tagaaaatgagtaatattgtatatttcaatggcagcgattttaagattttaagtagatctttttttttgataagaaggtttcattatactatatgataattatcatgaaatttacaacccgatgaatattggtaaaattacatatacgtgtaatatttggtaaccaaaaagaaaattcacatgtaaaacatcacagtaaataattataagtaactatgtgataggagacaaaaatgtatttgtgttgaaaatatatctcttttgattgaaactggaaatagaaggccaagactaatatgacatgattcgtacgtataagatattcctcacatctaagagattttgttttctgtacgttttacctaattagttgatagttttattctttagctgcaagtggtaaagagtcaagaacgtgtgagctcctcaaattgtactcccactatcttagttttcattattttttaataggttctttattttcgtgttataaagttgattcgctgaaaagtgctatctcaaaccgacatcaagaaagctatatataaaggacccttagagacccttcactacatcaaaaacaaactctaagtcatctcttatatatcgtcagccaaagacttcaagttctctagcttaccaatttcacccttttctctcatttcaataaaagaaactacccatttcatcctcggcgagtcgctcttcgaacacatttcacattataataccaatggataagctacagaagat

SEQ ID NO: 51053 - DNA, 811 bp, Arabidopsis thaliana
tagaatatctaataagagctgagattgaagctaatatgcagcaaaagttaatcaaccagaggtactaatacagttttattttcatactgatgactcatgggtacacaaatattattacctggaataggtcgaactgtctggaagatagacaagctgcatccatggaaatagaaatgtacaaacgtttagccattgctctcaatgacaaaaaaaaaaaagaacacttgtcgaaaataaaccaaatgttttatcaaacacttcaaattgataaagctgtcaaatcctctcatgacaatgaacattgaaaaccttcaaccaatctattgccaaaagcacacaactttcactcaaacacagtcataaaaatcagctcaaatcgatataaggttgtgacagaacattggtgagaatcaaaggcctgagaagagagaagatacctatcagtggtgatctctgaaaatttacgaggactccatgacattaacagattcccaacacagagtaagctaccttcgtatttgactttattcacagtgaaactcgtatcattaaatctgcaaagtaagtgaagagaatcaatcaaccaccacatatttatacatgtccaattccaaaaaccctaatcattcattaaatcagacccagaaacacagtcggtaaaaaacaggatcaacgacgaaaaacaatagagaaagcttggaattgattactcttggaagcgaactggctcttcaggaacattgtcaatgagattgatctgatcatagagggaaaaagctcgtctcagagagggcaacacaggattagaatg

SEQ ID NO: 51054 - DNA, 546 bp, Arabidopsis thaliana
ctttagttaccaaccgaaaagaaaccaaatgcaagcatcatctaatgaataaataagaattaatgttaataaggaccttggccagtctcaaagctaccctggctcgaggcatccatagagtttccatgctttacgtttgtagcattcaacaaatcattctcttcaccagcgagtacgatcccagagtcacccatgaacgttaattcaggcctaggaaatgcttgcatagcagtgatttggtccacccacattctatcctcgttctttctcttgcacaagtccacaaagttaacacacgcttccctggatgcaaaaagaacacaagttcattcataatttcgttacaaatgcttacaaataacacaacgacatgaatggtttagctacataccttaaccgcgaacgtccgaaagcatcagcaaacgaaaagaggtcatccatgtagtcaagttcaaacccaacaaccaaagctcgagcataagccatcgcttgctctttgcacaaagccgctttacggttctccagaacacgctgaagaccacccta

SEQ ID NO: 51055 - DNA, 729 bp, Arabidopsis thaliana
ctccaaggaaaatcagataagtcataatggatctatccctggctccgacaacaacaacaagttccgaccaagaacaagacagagaccaagaattaacctccaacatcggagcaagcagcagctccggtcccagcggaaacaacaacaaccttccgatgatgatgattccacctccggagaaagaacacatgttcgacaaagtggtaacaccaagcgacgtcggaaaactcaacagactcgtgatccctaaacaacacgctgagaggtatttccctctagactcctcaaacaaccaaaacggcacgcttttgaacttccaagacagaaacggcaagatgtggagattccgttactcgtattggaactctagccagagctacgttatgaccaaaggatggagccgtttcgtcaaagagaaaaagctcgatgcaggagacattgtctctttccaacgaggcatcggagatgagtcagaaagatccaaactttacatagattggaggcatagacccgacatgagcctcgttcaagcacatcagtttggtaattttggtttcaatttcaatttcccgaccacttctcaatattccaacagatttcatccattgccagaatataactccgtcccgattcaccggggcttaaacatcggaaatcacaacgttcctattataacaccagcgtcaagagttcgtagggtatggttatgggaatttagctggaaggtgt

SEQ ID NO: 51056 - DNA, 1536 bp, Arabidopsis thaliana
aaataagagtctcatacttatcacgctttttgagtttggccattcatagaagattgattggagatgatactttttgcctcgagagtgtttgacagacgcgataactgtgaacatacagtaaggcttctcttaattcacgctcttcaaatcaaatacactgagctccaaaacatttgttcagtgacgaaatcgaaattgtacaaatggttgatgattttgtgtttgtgttttattgtgcatctatggaggtcgttttgtcggtgatcaagacagggcaaattcacctttgtggaacttatccatggcctctttaaactcaggcattgcagattcgcgcagatttaccaaaaccttaaacccactgtctttcttgcttccagctgcagcatcagtagaatatggcaagaaaaaacatggttccatgcttccaagcaacttgtttgatagtggcaaaaccgtcacaggtcctccccatccaaaatcaatcgtggaatgccccaagtatcgccagtccgtgaatccggtcactcctgtgttacacaatcccaacgagaaaaccaaaaatgcatgaaactttgactttggtattccatcggttcccaaaacaaatccttaatatatatagtttacctgtaccggcattgattccatctttgtgatgcagctcttggaagtcgataaaggagcgtacatattcatcactcgtattggatttgctctgttttatgagctctgcagttttccagattggttgctcaatgagttctccagctttgatctgagcatacattggcacacatccatttccccagtagcctttaggctaaggtggattcatcaatctccttatatttatcgaatacacaaatttcacattctccttttcctcagtctttgcagctcttaccctgaatttcgatattttattgtttcagatcaaacacatttcaaaaaatttgattgaatcaaacatagtgaagaagaggttacttactttgcacgccaaatgtaagcaccaagagcttcgaatgtggtgaaattcagacccgatttctcgagtaattgagccttcaattgatccaaagaatcgtcggtcacaaagaagcagtctcttttgacgtctccaatggcttgtccatatggatcaaagtccttatccaggctcaagaagtcacgaactggagctccaacccaaggcttctcccttggaccaagtaaacgttctctgtcccaaaccggttcgatcgaaatctttgtcgctccgcgagctaattccgccatagcgttgaagaacagactcgcacctaacccatcgcagatcgcatgatgaatcgatgcacctagaacccaaccaccacactgaaacatagtgacctggaggatacaaggattgaccattccttcctcccgggtcggatccggtaccaatctctcgacgaaacctggatcgggtccatccaaatagccgactgactcaagcgtacagttcactgtagcgtttgctaaaggcacgctttgatcagcggagacgagtag

SEQ ID NO: 51057 - DNA, 556 bp, Arabidopsis thaliana columbia
caaaacaatcaaactcacccaaaagacttccacgatttgactcagcacacagtacttatgttcaattctattgattcgatctcgtgaggcagggcaaagcaacaagccagatgatgtttcatgttcctttttggtctgtgccctttgatgtaatcttagacttgagtgctaagctacttatatcgtcgtctccttcaagatcactgaaagaaacatcatcctcattcactgtaaacattggagcccaagaattagcagaatcttcttcttctggccaatcatcatcatcatcatcaacaacatctttagatgtttggctaaggcttgcactatttttgtcgttcttctggattggttttcctcaataacagctttatcgatgaactgagcgttttcaaacccgtgttcaaaatcgcgatacataatcgaaggaggttcaaaagcatatattcttggagaaagaaactcaggaggagcatggttgtagtaattagaagttgatggtgtaatatcttcttcctcaagaatcatatctctactttcttttgaagaatgt

SEQ ID NO: 51058 - DNA, 563 bp, Arabidopsis thaliana columbia
atccccttcttaaagaaagagaagtcgaaaccataacaccgctcttataggatgaccggtttttggaagtttactaatcccaaaatgaaaatgagaactggtcaagattagtttggttcggtttacgtcgtctttcatcattggcatgtaaaatttagtttagaaacgaaccagttactttgacaaaaaaaaaaagaaacgaaccagttaatgtagcatgcatgatacatcaaaataaaatgagatcatgtttacacgtatagcatctctgaaacgaaccaaatgtgtatcatcacgattctcttctatttggtgaaggaaaagtttaatatttcccatatctctgaacttgctgtgatagaactgttttctagggttttatgtttggaaagtttaaactgtttcttggacaggaagaaagccttgcggctggctaaggcctaactttagaaacgccgatagagatgctcttatggacttggtttcgtttccaaaataatatggatgggtttgggatgttggtcttgtcaaagttccacttatttagttagttcgccaagact

SEQ ID NO: 51059 - DNA, 576 bp, Arabidopsis thaliana columbia
gtatgtggcatcgaagacttggtcatgcttctctacagagattggatgttatttcagactctttggggactactaagcctaagaataaaggctcagattattgtcatgtttgtcatttagctaaacagagaaagttacccttcccttctcagaataaagtttgtaatgaaatctttgatttgttacacattgacatttggggtcctttttcagttgagacagtggatggctataaatattttttgacaattgtggatgatcattccagagctacatggatttatttgcttagaaacaagtcagaagttcttactgtgtttcctgctttcattgaacaagttgagaatcagtataaagtgagagtaaaggcagtgagatcagataatgcaccagaattgaaattcacaagtttatatcagcagaaagggattgtttcgtttcattcctgtcctgaaacaccggagcagaatttagtggttgagcgtaaacatcaacacatactcaatgtttctcgggctctcatgttccaatctcaggtacactctctctttggggtgattgtgtgttacggctgtg

SEQ ID NO: 51060 - DNA, 527 bp, Arabidopsis thaliana columbia
attaatgacaattagaggtacgtgggaatgctcgttgccaaatttatatgtttagtcaacgcctccatttaatgttaattctcatgtaatttaataattataagctcataatttcattagtagaatttctcaattttcaggactaacaatatgttagatttctgattctgatttaatgtggaattgtgttattttgtgtaaatgttttttcaacttcgtgttggttactaaaattgtcatatgagtcatgagtaataccctcatgatactaagattctttaccattgtatttacgtacgttagtatggtaatggaacccattaatcaatatgaaaaataacataaatcaaaagttgaaaaccctatctgtaacatggatcaccattcaatctcgtagcttataataagggctataatagtattttaaaaaaattaaggaacccaggattctgatctaatcagagtagatgacattattatcactggacagagaattgctatatccagccgtcgaagatggaggagga

SEQ ID NO: 51061 - DNA, 604 bp, Arabidopsis thaliana columbia
cccttatatgttgattttgattggttattatttttgaaaattaataatgtatttcgtttttaattaaatttcattaattaaattagtatttgactttttaatctttaaagagataaattaatttactctttaaaattttatttctaatggcatacctatgtaattacttacaaaaattaaggttatatttaaaatgtacttcccaaataatatagtaggatcattgtacttgttgttaaattttggatttatccaagactttacatatttaaatgtcaaatcagtttactaattaaaataaacataatataaaaataaaaaaattagagataaatatgaataatcatgattcataaacgaagatattaacaaatatcataatctcctagatcttcgtatggccgatcccatcaaactcccttttaaagaagaataaaaaactactgatcacgatggctacaatggatctttcgtctgatttggtagaggagatactctcacgggttccagcgagatctcttgtacgattgagatcccatgcaagcagtgggaaccctaatcgcagagccgagattcgtaacaagcacttgtctcacatgcgtta

SEQ ID NO: 51062 - DNA, 613 bp, Arabidopsis thaliana columbia
aatatgcttaaacaatcatagagacgacaaaattataaagaaacaattggcaaactagcacacgaattgaaaattcgaggaaggtaaggtagagaggtacaacacaaaagtagtcgtatttgaactagattaaattaaagcaacaacttggtcactcaaacactggacttggacatatcgatatccattataccaaggaaaaatctaaggtacaaagaaagagataagctattttcttttttcgtacaactaatttccacttttctagttagacagaacccattaattagtcaacattgtgtttttttttctctctaatatgatatgaaagtacatacggttatgaagaaagctaaccagcttggtttacatcaacccaactctaaattcaatgattcatgctaaaagtatgacaactaaattacagtagttctttagtacaaatactaaaaaataatctcacctatgttgttgaattttttctaaacctccggcagaattatcagcggccacggtggcagctaactccattagtcgttcatagtcaatctcactacacttgtacttcagtttcatccagcttcaaccatgatctgatcaaatacagattgtg

SEQ ID NO: 51063 - DNA, 438 bp, Arabidopsis thaliana columbia
tattaaaaatgtaagcgtacctatttaattcattagatcacaacatcttataaatagcaaatttttataccatacaataaaacggactactaaaatccatgataatcttcaccccttaccaaaaaaaaacaaaatccatggcaattcatagtcataccacttgcattgcttcaccatgacaccatatctagaattagtaacgtaacatatatcatcgacactaaaatttggtttgatgataaagccatttatatgataagagtcataagactgatcgacatccaaattacattatcttacataccactttgcatgcttaggacatgcttcatgagagatacattaaagcttgctaacttgatcaacaccattgtgtttgacatttaggctaaatggtgtcttcaacaggctcatccatagtctacctgtggcaatgag

SEQ ID NO: 51064 - DNA, 394 bp, Arabidopsis thaliana columbia
  unsure (1)..(394): unsure at all n locations
ccgcacccaacatctctcgcgtctcctttagtgtcttccctctggatccatcgatttcgcctccttttctcatcgatccagtggctctctcttgagagatcgcttccactantgccttagttccctcacgtttacggtctctgctatttcgtagctgtagcacttggtcataccgaatgtgtccacggagacactacttttgctcctgggtcttgacctcatgctgtaccttagcctactacttcagtgtatcgttcagcatcgtgaatcggtttgggaacggttctctccgatgaagactacgcgtggtagctttgcttgcgctaaggtgcctggttcttgtggacggaaactagaggcgggaggaggttccggcacactctgattggtgctg

SEQ ID NO: 51065 - DNA, 1125 bp, Arabidopsis thaliana
tcccctcaagcttttcagatcacccacattggacggaacttcgccggagaatctgttgaaactgagattaaggatggtaagattagctagctttgttatctccgacggtattgctccggtgagatgattttcattgagattcaatgtctcgagtccgtacaagctgagaagatccgatggaatccgacccgagaacccgtttcttccaagagatatcgttgtcaggctccgtaactgacttagaaaacccggaatctgacccgagaacttgtttccttcgaaatcaacgactcttaacgatttgcaattacggatactcgtcggaatttctccaacaagtgaattgttagctactctcagctcctgaagcgccatcaagttcccaactttagccgtaacaccaccggagaaaccgtttccagaaatatccaaaaccactaaagaggtcaaatcagtcaaccacgcgggaaaatcgccattaatgcgattctcgtgaatgtcgagaatctccaaattagggttcacgcaagctgcatttgacggcttagctattcccgtgaagttattaactcctaattgaatgattcgcatggaggaattgtaacctgaataaccacatagaagactaaccggaactgtaccggtaaatgaattctccgataatgaaatcacctgcaggcttcgaatcgtgcctaaagtaaccggaattaaaccggtgaggtgattaccggttacgctgaagtgtataagcgatgaacagttggctaatgcggatggtattgtgccttgtaattggtttgagtctagccagagatactcgaggtcttgtagttgtcccaatgtagccgggatctcaccggagaagtggttgaacgagaggttgatgagctggagagatgaatccgctgagaaattcgccggaatcttaccggatattgcattggaagacaaatcgacgtaacgaaggctcttcgagactgtgacgtcggatagatttccggtgagtgagttgtgagcagcgttgaggacctggaggtttcgtagattcagtatctccggtggaaaatcgccggagaaggagttgtagtgaagataaagagctctaaggaagaccaacgagagaga

SEQ ID NO: 51066 - DNA, 441 bp, Arabidopsis thaliana columbia
gttaaaatcgtttccacagtaactaactgcaatcataattagtcttgcgagcagaatttgcacagctgcgaagttcgggtaactacagttgatgcaccaggatcttgcttttgtttgcggaacaagtcaagcaggagcgttctctcttcagtgctcagatgcctctgtagttcctttgcttcttcagctttatcacttacgggataacaagagataacaagctgaaaccaatcctgtatatctgataaagacgggggaaaacaataatgagctaggcatgcaaagtaaaagatagacaacaaaaccttagtcttaaattgctccctagactgtccatctgatgccaactatgaccacttctcagatgaggactcaggactatcactaagtcaatgttatttcataagtaaatatacttgttctacatccacacccgagcct

SEQ ID NO: 51067 - DNA, 547 bp, Arabidopsis thaliana columbia
tgaaatttccagcggtttttactcattggataaaactgtgtattattacggcctcgttctcagttcaagtaaacggtgatctcgctggttatttccaaagtgcaaggggtttgcgtcagggttgctctttatctccatatctgtttgtaatatgtatggatgtcctctccaagatgttggataaggctgctggtgctcataaatttggtttccatcccaaatgtaaacgtctaggcctaacacatctcagttttgctgacgatttgatggttctttctgatggtaaggttcgttccatagagggaatagtggagattttctatgagttttataagcattctggcttaaaaattagtatggagaagtcgactttgtatatggctggagcgtcaccaatagtaagagctgagattgcagataaatttctttttgaggttggtcaattacccgtcagatacttaggcttacctttggttactaagagactctcggctggggactatgctccgcttctcgagcagataagaaaacgcattgcatcatggac

SEQ ID NO: 51068 - DNA, 289 bp, Arabidopsis thaliana columbia
gctactatgatagatttattgacaaaaagaaaccaaggatacaaataacattcctttacaaggagatttctatctctcttaccctggattgcttcgcatgtaaagcttattcaaactcaaatcaaataacataaaggaaattacttaatagaatcataatatcatatcaatcaccttccaaacaaatcatctaattattcccaattagtttgttatctagatcggaatgtatgaaggataagttgaagtttatcgttgaagaaaagaaaccgcacggaggagatacgcg

SEQ ID NO: 51069 - DNA, 1171 bp, Arabidopsis thaliana
ataactatttcggtctggagtttcattaaatcgacttaatttaggatcttcccggtgcactcgatgatgcggctgttacagaagccttggagttgcataagataaagagtcgtcaatgggcaatcttcaaaacttgtgctgtgaaaggcgagggacttttcgagggattggactggtaagcacattctgaaaccggaaccattttcttggtcccattattgaaacactgaacccatttctttatgcatttcttctcaaatattcttctctcatttccatcttgatcttcaggttgagtaatacattgaagtcgggaagtggctaaaatcatcgtcatacaccaatctgtcacatttctcaagagtgtaactttgatcatttttacttattggtttgtttagtatcttttttttatcttagttcttcatcttaaagagttaatatcaatgacatgttcacttaatattctctttttgttgtcttgtttcattctgaaagaaaaaacccaacacagatttttgattgagacccataaggggtaatatcatcactttttaacatgaaatattgaactgattccagacgaaacactgaattggttccaagtggtgtttttgccgacttggattcagaagctcaaacgtttggggttttagaagtcctaatttatgtaatttgtctgctccttaattaatgataaaattgttgacactattatgccatttagtagatagtaagatttttttttaatgttttcaaagaggcaaaaataatttgcaaggaatatatagaactagcaagatactagcctaagctatttgattaactttcctgctaataatgctagtatgctaccaaaacaaaacacaagcgatttgtgaagctctttcttaaagagtccggctcggcgtttagagaatgtaacttgacggtggctctctttcttgatcttaccatagaatcttttatatggcgggtgttgagcaaattaacttaaacaaatttgttttattatcgtaactcaataaaaattacgatttctagtcataaacaaaaggctgtacatagcattaggcctgctacggatccggatatccgggttttttggagtatctggatccgtatccgtatccggcggatatgtagttttaggatccgcatccggatccgt

SEQ ID NO: 51070 - DNA, 453 bp, Arabidopsis thaliana
cattaataacgcgagatccgcggcgtgaagtcagcgagtaatttaatacgtttgatccgatgtattgagtataaatacgagtcgatgacatttgtaaaggggacgaaaaagaatacactaatactatacacaaaattcaaaaacactcattcctcttttcgattcgatcattgtttgtttaacaagactaaagatccccgtaaaaacaaccacaagattctaattgcggattccgacatccacagctatcaggacaacttcccaagtctctgatcaaatgcactgacctcgagtttctgaacgtggaagataacagaatcaatgacaaatttccattttggttgagatcgttgtccaatctacagattcttgtccttcgttctaatgagttctatgggccaatattttctcctggagattctttgagttccccaagttgcgaatctttgatat

SEQ ID NO: 51071 - DNA, 873 bp, Arabidopsis thaliana columbia
tattccaaggccaaaaaaaggaaagtcagaaacaaagcatagaattaacaaaccatgacacgagtataatccaattccaaggtatggtagagagaagttgattgcacaaattcgtaaaagcgaatgattactgattcactttgaattgtgaagtctttgttaattatgtcgtttctttactcaatttagggagttaggttattttttagaaaacaaaattgtggagttaattaaagctaatgtatcaaccttttactggtctttaagatctgagtttttacaagttttgttattattgtattcatataatactattctgttaaagaaaatgtaaatagtgattaaaatcaatttgatcatctactctctttttctatatgtccaacgagacaggacaaatcagcttggtcattgattacgggtagatagtagactttgatgatcatttttgctggccgtataaattaattttataacagttatgcgttgttcgttgtgggtatgtatcaacgtacgaaatgcacattggtgaaaaatttagatcgattgtgatatatgaagacttaacaagtttatactaaactactaatatttatttatgatgacaaattgaaccttacatgaaagacgaaaatgaatacataatttcgttttttctgaggattttctctggggtaaataagccttttgctgatctcaaacacactgagataaaatctcagatgaaaaaatatccctcggtaaaaaaagggaaaaaaatcagcaaaagggcaaactcccccacaaaaaatcccattttcataagaaaaataaaagacttcaagatctctaaaacgaaaaagaaaggattacagaaaaagattacgaaagtgt

SEQ ID NO: 51072 - DNA, 543 bp, Arabidopsis thaliana
caaacaacaacttcagcggttctattcctcggtgttttgagaatttacatctttatgtcttgcaccttcggaataacaacctctctggtatttttccagaggaagctatcagtcatcacttgcaatcatttgatgttggtcacaatcttttctcaggagaacttcccaaatcattgatcaactgcagtgatatcgagtttctaaacgtggaagataacagaatcaatgacacgtttccatcctggttggaattgttgcccaatcttcagattcttgtccttcgttctaacgagttctatgggccaatattttctcctggagattctttaagtttctccaggttgcgaatctttgatatttcggaaaatcgcttcactggagttttgccgtcagattactttgttggttggagtgtaatgtcatcagtcgtggacattgatggtagaataattcagtatacagttacaggaattgaccgggacttctaccataagtctgtagcctcatatacacaggattaaagatggagctggttgggagtgg

SEQ ID NO: 51073 - DNA, 1123 bp, Arabidopsis thaliana
cggatatttttctattgatattgaattaggttttcactgaaaaataaaattttctattttccaactcaaacacatatatagcatatatataaattgaatagatacattgcaactagttaccttcctcattttcataaattagtaaaacaaaatacaagaaactgctaagattgacgaatcaatacgcgtatcaaaaaaaacgaaatatacgtttccattaaaaaagaagaaaggtaaaaataaataaatgtagatgcgattcaaatattcaaacatagagttatgtaataaatgagaatcatgcttactatgtgcatataatagagagacttattaaaagcccttcccttaaaaacttcccaattccattcctcttcctcttccttctccttcttcttcttcttcaccatttatttctcatcatcatacttataaaaagtaaatcagaatcccgaagcaaactttcaatcttccatcatcatcatcatgtccgatacacatacatacatacatatctttcgtgtgtgcatacttattaaagagagttctctcattaagaagaagcttccttctttcttttctttttcttctctctgttcatggcggttcaagctcatcaccatccttctactctcttcttcctcaacaacggacaagaagggaatgatcagccgcataaatctcagtttcattcaatcaacgccggtttgttttctaaattctcgtttttgttgagaaatcaatcggtttattaatatctaaccggtgaatcggtttatctttttgggcgggtaaaaaaaacaggggttgatacaagaaagcgagcgagagaagtttcttcggtgattgatttagatatcacggcggctccgatgaaccctccgccgcaaactccaccgcaagttataggacgtcgacaaaatccgaatgttgtatcaaccggtctacgtttgtctcgtgaacagtcgcagaatcaagaacaacggtttttgtcttttccgataaccggagatgtcgccggagaaatcaaaagccaaacggacgaattaaatagatttcttcaaatccaggtaactattttcatttttttcattttgttaaaagttttatttattgaaaatga

SEQ ID NO: 51074 - DNA, 488 bp, Arabidopsis thaliana columbia
  unsure (1)..(488): unsure at all n locations
cgacctttattttgaaaggaatgcttttttattaattggaaattacaaacgaaaacaaacaatttgtgtccccaactatattttttggaccaattaactaatcactaaaggtctcatgtggagacttaataaaccttaaatgtaattgtcattatgagtttgaatgacgttatgctgagttcaatgagaaaatatggttggtaattggtagttgtgtgtcataactcgtaattaaatcacgccacaaataattaactcgatgctaattaagaataaaacctcttttcaaaataaacaaaattaaaagctttccatgtcaaagttgcttcctttggcttcttcctacacacttgcttcacatgtctactacactgactgactgacacaacgataaagtacacttatcgtgtttcttggtctcatcataagttcaatggcggacaatcgaagaagaagaagcctattcgactcnctacttttctccgtgt

SEQ ID NO: 51075 - DNA, 535 bp, Arabidopsis thaliana columbia
gttgaaacagcaaatggagaagttaaagagtaagcacaaaacagaaatgagcacaatgaagcaatatctagcagaaagcaaattaccagggtctgcattagaggcatggttcaaggagaatgagcaagaagaggaagaagagcatgtatcatcatcagaacacagaaccggtgttgtgagctatgacaactatacagacgatcaagcatggagatctgagtttggagccatatatcaagaccatgaccatcactactgattcatgttacaaatttatcatttcatttcaagaacaaaaaaacttcttgggcaatttctgcaatttcttgcccatcttgggcaggcctgttcttacattttattaaaaaatctatatatataagtttctgcaatttcttcataacatataggcccaagtgaggccgaattgaggccataatgaatatagtgtttggctacaggtaaaaaagcaaactctgtttctaatttttgaagattaggtagaaaacgaaagtgtgtcttcaagcttcaaaga

SEQ ID NO: 51076 - DNA, 565 bp, Arabidopsis thaliana columbia
agtacaaaggtaattccaaaagaacaaacaaacgaaaagagaaaaaggcggtgagaacacctcgccgtttctctatgccgaaaaacgctacgcagtttcaaagagaggcaccaaaatggagcgcgcttttctctgttttgcctcactgatttctatttctccattcgacgatggctgcgtaaagagtgtgattgggcaaaaggttcacgttttgtaacggcgaattagtaaccggagacgtccggtggttctccatccactcctctatggctctccggtcataagtgtacccatcagccgcaatacatggctccttcatcacatcctgcaatataacaacattcttctttaaattaacctcacttctcttgcaagtaaacagataacgtagcaaacaagttattaccttaagtaatggacagaagaaatggcttggaggttgacttggcgcacgggaaagcgagtttcttgctttatcagctactttcttcaagctttccaatactggaagaatctgatcttccaaatcaggcctgtctttagaacggagctctgtacactggag

SEQ ID NO: 51077 - DNA, 481 bp, Arabidopsis thaliana columbia
tcgatcattcagattgttggaaccatcttcgtcatgtcgcaagttgcttggcaagtgtgtgtcatcttcattccagtagcagtagcctgcgtgttttaccaggcaagagagaaaaaaaatccaaattcttgacaatgatacaacaaatcttgcttacttttttgtttactcgtgttttctttagagatattacacaccaacagagagagaactgtcacgcatgtcaggagtagaaagagctccaatcctccaccatttcgctgaatcgcttgctggtgcaacaacaatacgtgcttttgatcaacgagatcgcttcattagctcaaaccttgttctaatagatagccactcaaggccatggttccatgttgcatcagcaatggagtggctttccttcaggttgaatttgctgtctcattttgtctttgctttttccttggtgttacttgtgactctccctgaaggtgtcatcaatccaagt

SEQ ID NO: 51078 - DNA, 542 bp, Arabidopsis thaliana columbia
tattcattctacttaccacttggaccgagccttggtgtagccaggacggacggctagtgccgctgatgtatcctcaacggctctatcgaactggcccattttggataggcaagccgctctgttacatagcaagactgagtttcttgagtcgtggtctaacccttcggcatgaggccgtacaagcttcttgaaatcgtccggctttaaagaaatcgtttcctcgtgatcgcgctgctgtaaccgcctgcgcacgccggagaaccatactcacttccctgttgttaccatccaacttgccagctcgttgaatagcctcaacagcctctacgaatctgtttaaataacccggtttaggtcagatatcaactacaattgttagcttgtagggactcacagagaacaaacctgccggatgccatgtgaacttgagcccaaacgaccaagaaaccagcgtaaccgatcgatccgtaatactttgtgctcatttcccatcgaaaaccgggcatctagacaaagcatcgtcggcctcttgatgtctgtat

SEQ ID NO: 51079 - DNA, 944 bp, Arabidopsis thaliana
tctacaatggtatctcaaaggatctagactgtagccattggtgcctccctggactccctgatacttggaacttacttctctactcatctcttacttcctagtccttgttttacatatttgtttgtttctaccattttataaatagtttgtgatgatcctgtgtgattgtgattgatatttttccttcgttaatttaatcttaaatgtaattaacattgttactagtttacttgcagcatcgatcagcttaaattctccatacatttgttattactttaatttattttccaaactattataacgtgcgtatttacactttcaaagtctttaacaagcaaaacttgtgtgaaggaccaatacttacacgcattatccaaacctttgaacactccaaacgaattttacgacggcacaaagaggaggaggattggacagaagagaagcgaaaatggtaggagacatcgccacgagatggaaagaattgagcggtagtagcaagtggaaagacctgcttgatcctcttgacttggatctacgccgttatatcctacactatggtgatatggctgaggtagggtaccttgcctttaatagtgaccgccggtctaaatatgtaggagatagctgctacaccaaagaagagctctttgctcgaaccggttacctcaaagccaaccctttcaggtaacaaacgtatccactagtatcatccatatcgtttcggttctagaaatttttgtctagttttcatacctactcataataggaaacgtgtgaatcaatgttgtcatccaggtacgaggtgaccaagtacatatatggaacctcgtctataaggttaccaggatgtgtcataatcaaatcattgtccagggaagcatgggtcgaagagtctaactagcttgggttacattgcggtggctacagacgaaggcgagaagttg

SEQ ID NO: 51080 - DNA, 359 bp, Arabidopsis thaliana columbia
gccccattaaacttaagtttatcagcattactttgtaaccatgacataacattgcaaaatttaaacgcatgggttacaaaagcagatagttttattctagctgtaaactaatgcatgatcatggctagcaaaacatacgagttaagacacagtacctttaacgccattgtttttatgctgataaggcaacttgccgacttcaagtaacaaagcaacctccttcccacaagaagaagcaatctcgaactcactcttgatctccttaacaacttctctgagatccctagtggcatgaatcgacaaactggataagctacttatcttggaagattcaacatcaaaagacgaagtgctcgttg

SEQ ID NO: 51081 - DNA, 621 bp, Arabidopsis thaliana columbia
tgtggttagagcaacacaaacgacgacggatcatatcgaagagagcgaactcgaattgacattgagcattggattgtcttcttcatctactactatgaccacgacaacgaacaaggacatggactactcgtcaacaacgtcaatgagatcatcatcggataattgtaataatcagagcaataataatctatataataacagcaataataaccaagaaagtagcggaccaaacacgcctatgagcagctcaagtacgacgtcgttggatcgagagaagaagagacctcattggctctttcaaggacttagtattaaccgaacctcttcttgatttttgttaattcactgactctttcttttttcttcttcgtcttcttcttgatttttttattttctttttgtatctgatttatcgttattattatttacgagatttactgatttcacttttagctaggtctaattattcttcttcgttaacactgataaaccattgacaaaatataccaatgttttctttatatttggttgcttaaagaatttattgtcacttgctttcggagaccaatgaggtcatcactagaacttataatataaagaatgaaggaaaacagagaaatt

SEQ ID NO: 51082 - DNA, 611 bp, Arabidopsis thaliana
cggtaaacatgtctgaatgtgttactgacattgtggaaaatatagcacaagcattctggcatgaagcgaatatttgcagcttctccccagatgagaagatacaagcccatatatagtatcttccgctgttgtatatcttgagcagcttgaggaagcctttgcaaaaaaatagagtgaattttgagtacagtatgaatatcattcaacaacattttccatccaagcgacttagaaaataaaattttgtcagctaccttaaactgtgtttacgtcctaaaaatttgcaccaattcttgtagttcttaaagagctttgacatgacagtatcaacggctctgtcatcgagctgcatatatagaataaatagatcaagaatctgttgctaaaggaaacgtttttaatagatgaagatatataatggaatattgagataatgctttgtttttctatcaacattggacaattctgtttaagggtcttggaaaagaaaccccttgatataaatgaataaacattggaaaattctattatgttgtcacagggtcgatgaacgttaatcagacaatagccaaagctctgaattccactctactcaccctagtgttggtggg

SEQ ID NO: 51083 - DNA, 467 bp, Arabidopsis thaliana columbia
tttcccttattatatatcccacatacaaataataaatagtcgttagtgggtacactgcaatcgctaattttaccgtcaattcaccctgtccattttggttttcttgtctctcttaagtaatagttagctttaatataattagttgaattatcctcagtaagatgtttcagatgaatgccactattgtctaaaatgtatttatcattcgaatatattttacttacgagatatttatatgtctagtagaatacaccagcttttattttatactgtaataaatgaagaacattattgtcttttataatttcaatgtaaaaagtttgaaaatgtagttcatatatatatctatatatacatcccagctttatttttcatgctcgcttcccccatacaagtgtctctgtataatcataaacattaaggtccatctcgtttcttattgttgagatgcttccattacattgtat

SEQ ID NO: 51084 - DNA, 553 bp, Arabidopsis thaliana columbia
atatcaactatatcaaacgctgtcgttttatcaaatacatcaaacgctgtcgttttatcaaatacatcaaacgctgtcgtttgaccgacttctctctctctcgttctttgcattttggaaagttcgaaacagagcctctgtaaattacgcgtaaagtttcaatctttattcacacaattcacacagctaatgtaagcatgagaatcttcagattcacgtcaatctcaccgcggattttgccgtcgaatcattactcaacattcccgttgaaacaaaacgtgtcttctctctcaccggcgaaatacattgcgggactttacaagaacatatcaattctccggccccaaaagctggtaagaagatacacgcagatatcatcaaaactgggtttcaaccagatttgaatatatccatcaaactactcattcttcatttaaaatgcggttgcttgagttatgcacgccaagtgttcgacgaattcccaagccaacattatcggcttacaactacatgattagtgggtacttgaagcatggattggtaaaggaattac

SEQ ID NO: 51085 - DNA, 602 bp, Arabidopsis thaliana columbia
ctgtaaataaaacagttgttgtgaaagtcttacctccatgtgaattttcctgagggcaaaaggtttcggaaaaagcatccatgggacagcgatgaatgccagaagcaataacacaatctgcaggttatagtatcttgttagagtgttaagaggagtaagatgtggaaaaaaaaaacaatgtagctttggaaaaaaaaagagaaggaaaacgtgcctgaagtggacgctggccccagaacaactcgttttctccaagttcttcggtgggactcagaaacatgtagatcattacatgatacaagtctgcttgagatccagtgcaccacttgatgatgatgagcagtgaaaggtaaccaaataagctgttcagaaatatcatctgaggtataaactgatacctgatgacacatcacaaagacataagcgatcccggtagttttaaaaacataaaagaattcagaaagtttggaagataaataacaaataagacaaaccttatgtccaatgatgagccgaaaaagcgggcattaaagaaacttaatattagtccagattcatctgagcaattccagcagaatagacatcttcatcttaagagagtt

SEQ ID NO: 51086 - DNA, 737 bp, Arabidopsis thaliana
aaaaactagattagaacttaaagtagtggaaactagacgttcgataaaacgaacagaaaagcttagaatccacattagccaaagattaagtgtatctgtgtttaatgttgttttcaagcaaaaccaaaaagttgagctcaggaaacccagaatggatcatgataacttattagttcaaatactgtgacacattcgaatccaaaacaattggaggtaacaaagtaacgtacttgcgacgagaagcgggacggcggcgacacgaccaagtgttaatacggtaggcaatgtaagaactttggaagatgattgcgacggaggcggtgaagaattatcatcactatcaagctgaccgtgaccactgaaactgtttcgggaagaggaagttggtctgctttgctccgacgaagaggatgaagaaaagtaggatagacggtgttggtggcgagatatttgaatcggaaaccttagagatgtacgggaggagtaacgggaagtgataatgcaacggctaagatgcgccggaaaagaaaaggttggggatggacgtaacgtgcgccgcaaattgacatcgacgattaacgaagccagaccggatctgagcatgggcgagcttactaatttggatcgcttcgatttctgattgcaaattgaaaaaaatggtaaaaatcgaagaagatgaagtttaagggtacatgaaaagttcaaagaaattgggaaagacagtggcgactttggtg

SEQ ID NO: 51087 - DNA, 535 bp, Arabidopsis thaliana
ccccatctctctcggcaaaaacctgacgatgagctgcagcacgagcagcataagagacagccgcatctggcacactagcaccctctgcagtctcagcggtgggcgaaatcagaggatcaggcatcgggacgtctgcgaccggtgaagcaaccggagtgatgtttttgggagccaacggggacggaggagcagacggattggtgagaccagcgggttcggcatccttagaatcgctgagaacgagcggtggagcggacggtggtggaatcgagacagacggaggctgagaagacgtcgtcggcggaggagaggacgacagaagctcgcgaatcgacccaattccagaggcgaaaagcggagtggagagaacctggtaagccgggttggagagatccgggtaatcgatgggctcatcgaccagacggcgacgtttgctagccggaaaagcccacgacgattccggtgagagctcgcgcgatggtcaaggattcgggtaggattgaaggaggaagccatggtagcagacgaaggtggc

SEQ ID NO: 51088 - DNA, 1073 bp, Arabidopsis thaliana
tcagttcttaggtgctttagttttctctcactttgtgtttccaccatttttttccattctgtaaatgatgcgaatgctcatctttcgtcttgagaaagtaaacccacacctttcttgaccagtcatctgtaaacgagatgaaatattgacatctgccaagactgtgaggcacgttaggtgatccccaaaggtctgagtgaacatagccaagcttctcctttgtaacatgttgagctgtaccaaaacttgttctgtgtgttttccctataacacagtcttcacaaaacttaatttctgatatcctgtcatctccgaaacaacctttcttactcaaaacctccatggcctgttgccctatgtgtcccattctgctgtgccatatctgtttcacttgctgttgttatcagagattctgatcctgccatactagcctgtgcctctagtatatatagtgaagctctccttattcctcttatgaattcacttgagtcctgcatgactctcaatacaccattgttcgctttgaattcatagccttctgcttctaaagttcccattgatatcagatttcttcaaatctcaggaatgtatctaactccttgtagaacaatacttgttccatccttcttgataaacttgactttgccaattccttttacctcagagaaagaattatttgccattctaacctttcctgacttagcttccacaaagtccatcagatactccttccttggtgtcatatggaaagaacacccagtatccattatccactcttcttgatcgtcctttccctcactcatgttaacctctgaggctactagaccaaccaaatcttgagcatcatcctttactagtgctgtttcccctgcaccatttgctttgttcttttcaagccacttgtaacattgtctcttgaagtgtccttcctttccgcaaatccagcagactttctttccttctgttgatttaggtccatcacttcctctggcctgagacttacctcggacataaagaccttcccctacaggtctagatcctccagaactatctcttagttctaattcctttga

SEQ ID NO: 51089 - DNA, 434 bp, Arabidopsis thaliana
taaatgaaaatctccgaaggaaaataatttaatcacatggtgttattttattttatcatgaacctctaataaatgatctcgtttaatcaagaagggaaaaatgataattaaatcacgtagatcgaatttttttaccttctcttaattccgagattccgaggggaagaagagatctgaacctgtgagcatgatgacgtgttgttattattatcgacaagtaaacagtttcttggactgttagtggtattaacgttgatcatgccccacggcgaacgtgctacggcggcagaggagacggttatggccggagaattacacgtggaggcatcgtggatattgttactttgcgagatcttaattcttgggaagacactgcattgactcttaatatgatcacctcaaaaatctttggaaagattgcaaaacttttgttg

SEQ ID NO: 51090 - DNA, 527 bp, Arabidopsis thaliana
cttagcgaattcaaataattctttcgcatgaccaatgagtatttgggcataggcttcatcagatggtgcaaaggcgatagacgcagcagccattgctgtgctgtctcacctgctaggtcagaacctggatgttgagcatcaatgcgaaatgaaggacgtggagttgtcatatcctcaggcctcatccagcactcgtggtccgagtttccatcgcccacctgtccgtacaagacattgggctcaggatgggctttaatgagaaaatcggtggcccacttgagagccgcgagggcgttttcttgctcttgatgggccttaagctgtgttgccatctctatattgctccaagctagcattgttgtaaagaaggccaacggaaatccaaacttcatgttgtctccggcatcatagtaccctccggttagatcaacctatgcatttttacaataagcaaatattttagttgaacttgataaacatatattacaatacaaaaaaaaagggattgagatttagattacatgagc

SEQ ID NO: 51091 - DNA, 440 bp, Arabidopsis thaliana
gaagctatgctcatgtaagtttaatatccaattacttatttttattccatatttttttgtgtaatgaatatttattacttgaagtaaactgtttgctaattgtaaaaatagattgatctcaccggaggtattacgatgccggagacaatatgaagtttggatttcctttagcgttcactacgacgatgctagcttggagcaacatagagatgggatcagagcttagggcccaccacgagcaaggaaactcgctcagggctctcaagtgggccaccgattatctcattaaagcccatcctcagcctaatgtcctgtacggacaagtgggtgagggaaactcggaccacaaatgctggatgagacctgaggatatgaccactccgcgtacttcataccgcatcgatgctcaacatccaggttctgacctagcaggtgagaca

SEQ ID NO: 51092 - DNA, 572 bp, Arabidopsis thaliana
  unsure (1)..(572): unsure at all n locations
cttcttaccaatctttggagaggagattctgctcttagagacggttctgatgctcatgtaatttaacactcaaatccttttttttttttttttttgtaatgtatgtttatcaagttcaactaaaatatttgctatttgtaaaaatgtatagattgatctcaccggagggtactatgatgcgggagacaacatgaagtttggatttccgttggcgttcacgacaacaatgctagcttggagcaatatagagatggcatcacagcttagggcccaccacgagaagggaaacgctctcagggctctcaagtgggccaccgattatctcattaaagcccatcctcagcctaatgtcctgtacggacaagtgggtgaaggaaactcggaccacaaatgctggatgagacctgaggatatgaccactccgcgtacttcataccgcatcgatgctcaacatccaggttctgacctagcaggtgagacagctgcagcaatggcggcacgtcntatcgcctttgcaccatctgataaagcctatgccaatatactcattggtcatgcaaaagatttatttg

SEQ ID NO: 51093 - DNA, 1437 bp, Arabidopsis thaliana
attgacactatagaggctcctctatggtgtggtcttttaggataattggtcccgtatccaaccatgtagctcattttcttggggtttgacccaagtatgtagtctacctattacataaaccatgtaaattgttttcttcttatgttaatcattttagtcataaaccatgtaatcatcacagaaaatcctaagaactatgaagattacgaacactttgcatatctttataagaattaagtcttgaggattctcaaaacgtaatttaatttaaaagggaaaaacacgaatgcctgcctaacctgggcacgagcaaggttaagaagatcagaagcttgaaggacatcaccattggggcattgaatcgatgtttgtgcagcttcgaggtattttgcataagtggctaatgcgaaagaagcggtggcagtgtactggaggttgtcccacggcaagaaccagagcaaacctcctggggtctttttaacattgttgaaacccttttgagcacagttgcagatgaattgctctgccatactcttgtactcaatcatcttcccttcgttcttcactttcccttcaaacacaagctatcatttgcaaaagagtgagtgaattgtggcgtaagtaagggtatggtctcttttaggaaagtcatataacctaccttggctaccaagacttgcgctcccaagaacttatcgtcccacgcaaaaacggaccttgcacctccactattagaagcttgtgttagatgatcgagataagtctggtctccagtggcacggtgaagccaagccgcggcccaaagtaactcatcttcgtaaccgctgctagggtaaaagccacccgcgttaggaatggagttatgatagactccagggtaatccttagcgaattcaaatagttcttttgcgtgactaataagtgttttggcgtaggctgaatcagatggcgcaaatgccaaagaagccgcagccatcgctgctgctgtctcacccgcgagatccgcaccaggatgctgagggtcaatgcggtatgaagggcgcggagtggtcatatcctcgggtctcatccagcaggcatggtccaagttggcatcacccacctgtccgtacaagacattgggctcaggatgggctttaatgagataatcggtggcccacctgagagccgcgagggtgtttccgtgctcctgatgggccttaagctgtgattccatctctacactactccaagctagcattgttgttgtgaacgctaaaggaaatccgaacttcatattatctccagcatcgtaataccctccggtgagatcaacctatttttacaattggcaaatattttatttcaagtaataaatattcattacagaaaaagaataatgaaataaaatagatttggatattaaacttacatgagcatcagaaccatctctgagtg

SEQ ID NO: 51094 - DNA, 755 bp, Arabidopsis thaliana
ctaaagtggcgagaatacagcggttacctaccgtacaatcgtgcgcaatgtgcgcgttgatcatcagtaagttgtcgctgcccaccttcgtcaatccaccgccctggactgtgccacgatgaatggtgacgctttcgcgaatgcggttacgatcgccgatttccacacgggtcggttcgccagcatatttcagatcctggttaacttcgccgatggaggcgaactgataaatctcattatcgcggccaattttagtatgaccattcacgacaacgtgagatttcagtacggtaccctcaccaatttcgacatggggtccaacgatacaaaaaggaccaatgtgtgcgttcgcgccaattgacgcgccctcttccacaatggcggttggatgcacaaaggcggatttatcaatcacgtatcaggcctcccggctacgagcacacatcatcgttgcttcgcaaactactttaccatcgaccagagcaacccctttaaaacgggtcaggccgcggcgcgttttttcgaaagtgacttccatgatcatttgatcgccaggcacgaccgggcgcttgaagcgcgcttcgtcaataccagcgaagtagtacagctcacccggttccagttttcctacgcttttaaacgccagaatacctgttgcctgtgccattgcttccagaatcagcacactccgggaaaatcggttttccagggaaatggccctggaagaatggctcattgacagagacactttagag

SEQ ID NO: 51095 - DNA, 687 bp, Arabidopsis thaliana columbia
gttctggagcttttaataatcataagcataatttgttttgttagatatcattaatcaaagggcaaagaatctgggggtctaaaatgacaaaaacaatacaacatggggtgaatacctgaaagaaaagtaaatccgagttatactgtaaataatataaagcttatgggtcatgtatttatttaacgtaaacataaaaggccattttgataaatagtgagagtctgaaaaaaagaaagaggagaaaatccattgacgccctaacaaaagacgccggcgagtgtattcgtcactttctctagtttcctgtaacccaacccactcaaacgaaattttttcttaatctctctttcgttcttcttcttcttcttcttctttagattgttgtaattccaatcggaactctcgattcgctttcttctccgttcttctgtggcggaccggttttgtggttttttatttgaacattcccgatcttgccctgagttccacgatcagtttctttaaaccctaggttttacacaagcattctgtttctccagattatcgcagactctttcgttctattctttgtagttttgtaaaaggtatttcggtagatttagggtttgtctgtgtctagttttcgagatcgagagagatttgtgatgaatactaacagaggaagatatcaccgggtgttggaacggg

SEQ ID NO: 51096 - DNA, 1069 bp, Arabidopsis thaliana
tgaagattacataacgtgttctttgtcaaagcaggaacaaggtattatccatatggttgcaggccttggcttcgagtgggcattttatccaatccttgctcatggagtcaatgtagattttcgtgatattaagggatggagcgctcttcattgggctgcacaatttggaaggtgagtagccgataaagagtagactaacagtctcatttcaactttgttgattcgagtagaaaatagtgtcttgatgttttagcatcataatttcataagtaaaagaatgttatcacttggtcacctgtaaaaaggagtttaagatggaatctttcttagacaatagcttcaaatgaatcaaaataaccaatactgtgttctctgctgtggcagtgaaaaaatggtggctgcccttatagcttcaggggcatcggctggagcagtgactgatccaagtcggcaagatccaaatggcaaaactgcagcttcaatagctgcctctaatggccacaagggtcttgcaggttatctgtcagaggtggcgttaacaaaccatctctcatcgctcacacttgaagaaaccgagaattcaaaagacactgctcaagtgcaaactgagaaaactttgaattccatctcagaacaaagtccttccggtaacgaggatcaagtgtcattgaaagacacactggctgcagtacgaaatgcagctcaagcagctgcaagaatccaagcagcttttcgcgcacattcattcagaaagcgaaaacaaagagaagcagctttggttgcttgcttacaagagtatgggatgtattgtgaagatatagaagggatctcggccatgtcaaagctaacgtttggaaagggcaggaactacaattcagcagctttatctattcagaagaattttcgtggctataaagatcgtaaatgttttcaagagcttcgccagaaagttgtaaagattcaggtattttaacagctttagtgagatgaacatagttgtttcccattagcctttggcttctcgtgcagctctttattctcttctaattctggcaggctcatgtgcgag

SEQ ID NO: 51097 - DNA, 484 bp, Arabidopsis thaliana
ctcaaacctccacaagcgtatattactatttctagcttctctgttttctaaaattgcgagtaaaaatgattaactattgaataaaaatgtttctggtttagttaaggcataactacgattttgtaatggcactaatatatgaaaaaagggaactttgttgaaagacgagatgatggctaacacagaataattgtttctcttccccaaatgatttagttattgagacaaacttccaaaaagaaaagaaaatcgtactatgtttcttcatagttcatgtccacgagttaaggagtgggcatgaagagatagagaagattgatatttcatctttgtgatgttaccactttcgttcgatatgtggcttacttaaaagtccaagcaacttctatgacccaattcaactattttacctttcaaataaagttgaattgaccaggaggaacattggtgcttccgaactggaaaccagattgtggagcatgat

SEQ ID NO: 51098 - DNA, 575 bp, Arabidopsis thaliana columbia
tcaacgtggggacatgttttccagaggaaacgtacatccctctagcgttcccgaccttctcggatttcgggtctggtccaacggtgagagggtcgtcgagagcaaaaagagaaccgaacggtgagggagaagagtcgttgtctcctcttgcgtgagtaggcttggcaatgaggacggctgatgggtttggagcggtgagagtgtcgtgaaagaagaaatggagatttgtgatcacttgttgtttcggtgtgattggacgagtttctgaatagtattcgccgagtgcgaacgtgatgcaaagataaaaactaactactattcctaaattcttccccattaatcttttttggtttacatgtaatgttttttgttagaggttttagatgtattgtaatataaaagagtgaccaaagattgcaattgaataggaagatagtgactcaataggtcaggctttagactgatttggagtcaaatccatgttacatttctttaccatatgcatacagtttatattaaaataaagtaagagactaatcagatgattagaatgtgaaagaaatcattattattta

SEQ ID NO: 51099 - DNA, 489 bp, Arabidopsis thaliana
ccattgaaataacaaaaatgaattgaatattacaaaaatcaaataatcaaacacacaaaacacatctgtctggttcaactccaatatatctataccaaatggtcatcgtcgcttcgaatgataacgttatgttcgggcaccgaccacgaagacgatcgactagagtatcagagccacggtattacactcagagagagtatcttgcaaactcagctacaactgcgaagtgctaaaactcatggtgggtctagacttaggcacaaccggtacatcagcctcaccaatcagcatttgcaccactgacctcatagtgggcctaaatgctggatccggatgcgaacaagccaagcccacaaccaagacccgccacatctcaccttcatcaaacttaccttcaagcctagaatcagcagctgcagacactttcccttctttatagaaacccacacccattctactaaattcggattcacccaagattatgtcttt

SEQ ID NO: 51100 - DNA, 564 bp, Arabidopsis thaliana columbia
tcgactcaagccgactccttccaccattgtgccttcactgatagccattaagtgtcgtttgtgtatatcaccgacaaccgtggtaatatatctgcaatttcaaaaaagaaagataataagagcagtataaatatacaaaacctttgaactacttagacggaacataaatcttcaaggaaagaatcactgcttgaatttataaaactgagaggatcctaaaaccacaatttctggaattggcgactactaccagcaaccaaagctcaaaaaataactctgcagtaaacatctatctgaattgtattcattaagaaatatttggcacgaactagcctatttcttttaccttacttaaccaaaggttcttcctaccaattatgatcacctaatcatgagtgataacggtatataaaaggaatatgtaaactcactctttcggtaaactagatgaaggatgtgaaagtttctgtgcgaaatctcctgcatagcaagaagttgaaattctttttagaagaagggaagagaaacatagttccttgaaccaaaatgtcaaaccaagatata

SEQ ID NO: 51101 - DNA, 1144 bp, Arabidopsis thaliana
ttctaggtcttgtttgctttcccctcctgctaatcgaccaagcgaataatctccagctaaccacccatgaagcgaacaatcaacgaagtcgtcggatctacctccgtcaatactctcgattcctccattgctaagaagcctgtcttcctcaccaaaaaacagcgggaagagttagccctaaaacgccgccaggatcaaatctccgagcaacgtgtccgtcgtgagcaacttggtcgccccgagcccgagtcggaagatgtctccgatggagataccaatcgcgataatgatcgagatagagctagtgaccgagaccgagaacgtgaccgagatagggagagagatagagggcgagatcgagaccgcgatagggatagagacagggatagggatagagagcgagagagagaccgtgagcgtgaccgtcgtgaacgagatcgtgaaccggatcggagaaatagagaaaaggagagggaagaggaggttaaggctagggagaaggcgcgtgttgagaaattagttgagagagagaaggagaaggaacttgacgccattaaagagcagtatcttggaggtaagaagccgaagaagagagtcattaggccaagcgagaagtttcgtttctcttttgattgggaaaacactgaggatacttctagggatatgaacgttctttaccaaaaccctcatgaagctcagcttctctttgggagagggtttcgtgctggtatggaccgtcgtgagcagaagaaacaagcggctaagcatgagaaagagatgcgagacgagattcgtaagacagatggtattgtagagaaaccagaggaagctgctgctcagagagtgagagaagaagctgctgatacttatgactcgtttgatatgagggttgacaggcattggagtgataagagattagaggagatgactgaaagggattggcgtattttcagagaagatttcaatatctcttacaagggttcgaggattcctcgtccgatgaggagctgggaagagagtaagcttacttctgagcttttgaaagctgtggagagagctggatacaagaaaccttctcctattcaaatggcagctataccacttggactgcaacagcgtgatgttatcggcattgcagagactg

SEQ ID NO: 51102 - DNA, 1191 bp, Arabidopsis thaliana
acaaatcatgcaaccaacatcaataggttagatagtgttaacgcgtttggtttatgaacctataaaattgtcaaataaaaaaactacgacactatttttagtagaaaaaaccacaatcttcagaagctatacaaggtaggggaagttatatcactggatttcagtaacatagtttgaagttaggtcaaaactctggcagtcagaaataaagagaatcctaaagtctagataatgtatgtggagatactttgtcgttcctatacttaaaaatccaatgtgactacgatatgtctcatctaattttttacaagataatctaggactagcaaacagcataaggactggtgacaccttttagaatctataacaacagagaactttaaaactgagaaagctttggaaaagtaccactatacgcagccatgctcttggtatatcatgctgctttggcatcaactcaactaaatctgggacacagtggattccttccaccattgtgccttcactgattgccattaagtgtcgtttgtgtatatcacctacaaccgtggtaatatatctgcaattttaaaaacgaaagataataagagctacaaaacctttgaactacttagacagaacataaatgttcaaggaaacaaacaaccgttccttatctctatttctccgatccggttcaagatctcgttcacgacggtcacgctcacagttctctctcactctctatctctatccctatggcggtgtcgatctcgccatctatctttctccatgtcgcagtcacgacggaatggacgcgaaatgagcggtggagtctaaaagacctagctctcatttgggggaaaattgatgatgaagatggtgttctccggtgacgacggaggctacgaaggtgtttttggaagggattgtgtctcttgtgtagataagagtgaggaggaacacgacggtgaagaaagtgacctagatctgatttggggattttatgttttctactgttttgttgttgaggggaaagtttttttttttttgcttggggtatatagattgtgagactaaaaattttttggatctgaaaatttatggcgcttaagtgaatttttcatcgaagtattggcggaataagtgatttcagctttcggtttagtgatttttgatcttagctttgtagtactgctatcatatagtaat

SEQ ID NO: 51103 - DNA, 1120 bp, Arabidopsis thaliana
cccctaaactgtaacttatcaaaccgctgaaattgtatgttttaggtgctaaacagtattgtagggatgagttgattcaatttccttgagattggctgttttgagatgttggattccttgttgattttccaggtatgaacatgtaaaagctccagactccttgagtctcgtagaagtgacgacgcaacttctttcttcttatatgtctagaaatggatcaaacactggactaagaatccggaaatcgtatcgcaaaacgaatcaaaacgatgaaagttttagtctcttatacatctgtgattattgagctaataaaacaacttgatacgaaacaatcatgggacgtcaatgatagtttagttgatggatctgtttgtaaaaatcaaatattgactctctttgcgtcttgattctgtgaatatacacatcttgtctctatagctattcggtttagcaaaagcaggattggtagcgccgtaacaatggaaccaagtaacatctaaatagtaaataagttaaatgatattgaagatgagaatttgtagcaaagatgatgtgagagactctacagtagcaaccaaatgtgtgtatgaaggaaaaacaagtcagaccaaaacaatagtctacactctccatgtgaaatcatacaggactcaagataatcctcatgacagaagtaaaggaagaaaaaacccgcaaggttgaaatttggtaaccgaacaaaaaccgctttgaaggaggcacaagtgaaggaagcttaagctggcttttattctccagggacagggactccttgctttagcttctcccgcttgagcttctttttggaaacgggcttcttcttccttggaggtaggttcttctgagcataaacgtaaagcacgtagttggcgattaggaacacaagaagcggacctccaacaacaagcagcacgattaatcctgggttcaatcccttggcttcagcagccgcctatgaaattcagaccaatgtatgcataaatgataccaaacatagaaaacaacaatctaggaccaagcaaacatgtatactgaatgagattattgcaaagcgtgcaatgttgtccagcaatgcatgcaaatgattatttttttctat

SEQ ID NO: 51104 - DNA, 547 bp, Arabidopsis thaliana
gttttgctcactgattcaacaacacaagtatctctacaaacaaaacaactatatcgaaagtcaacaagttcactcacttggagatattcccgagatctgatcaggttgactggcctcgttaaaactgggtttaccgagtctgtacctatcaagctgtgaggcaattttaatttgaccttcttttgccacatgaaccagagagtgggtgagaccgctggaaacttctggatcaagatggaaatcagttgagtagaaagaagttggattcagatagtaaccagcagcatgaagaggattgtggaggtgcttgttccagacatcatctatcacatcccataatgtaaggtaatgttttttctcgtcattgaattccttcttgatactcagctttatgccgtccaaagtgtcatagatatatccgacatgctgattgttgtcggcatttgaaaacaagcgcagaccgtcagtcagaggagatgtacatttcagaatttcttcaacagcctcccaaaacgacggatcatttaccaaatttgatactgatttg

SEQ ID NO: 51105 - DNA, 1064 bp, Arabidopsis thaliana
cctaatgacatagtattaggtattttttgcaaattattcacacatgttgccaaaagttgttttttatattatatgtttggtcagcgaaaacggtttaaagcactctctctttcctctcgccttcctttgatgatcctttttagttcccttcttctcattgctcttgagaccatctccgaactcaaaggaaactagaaacaatggaagtgatgagcttgactgccccatcttcaccgagacaattatctggctgcttcttaagcgcaccaacaagccctagaagattcaatgagttttatagagagtttgaagaggccgcaacaagaaacttctccgaccgtcttacggttccttttgattgggaagagactccaggcacgcctaggaagatcaccaacgatgatgatgatgatattgatttcgctttcgagattggtgggaaactcgaaacgacgtcgctttttgctgaagagctttttgatggaggcaaaatcaaacccttgaagcctcctccgtatttacaattagaccatcatcatcagcctcagattttatctccaaggtctccaagatcacctattgctcatggtaagaacattatccgcaaagctttttccccaagaaagaaaccggataacgtggatccttttgaaggtcgccatggataaagctaggaatggcttaggagaggaaagagggagagggagacgtcaaaactctggtcgtagagttgctcgatcactttcgccttttcgggtttcggcttatccatgggaagaacaagaacaagaacaagaacaagaacagagagatgtacaagaacagaggaaagggaccttgtcttctattccatctacatcttcatcagcttgcgtgtcttgcaagtcatcttcctcaaagaaatggagactaaaggactttcttctgttccgaagtgcatccgaaggaagagcaaggcacaacaaagattcggtaaagacgtttacaagtttgtttaggaagcaagaagacaccaagaactcgagttcacgaggaagagggtcatcatcggtctccgcccatga

SEQ ID NO: 51106 - DNA, 805 bp, Arabidopsis thaliana columbia
  unsure (1)..(805): unsure at all n locations
ggataataacttcccctaccataccttggggtggcatctacactaccaagggggtttgttgcaggcacaatcatccttgtagtcggcatgcttctatatgcttggacaccatctactaacacttccgattcaattatcccctcacccccatccacatagcggcaggaaaattggtttttgtaacattatttggtttccttctctcttctcatcttagcatatgctctttttttgtcaaataagaaatttttttatgcattctttacaaaagaatggttagttttcagttttgcttttcaaaaactatgcagaggataatgtactttgtaatgatgtatatcaattatcaacatattttttgtcaacagcatacaatttgcggatttgaatttaagttgatgacactaacaaaaactactgaaaaagttcgaacacaaaacactaatcagtatttgtggatcagaggcccatattattcagtcttctttgagtggttaacttgtaaatttctctcacacttggactcgttacccaaaagaacccataatgtttagagtgaccggaactctctcggcggcatcatctccagcggtggcggcggcgtctttctccgccgctctaagactttccataactcccactctcgctatcgcctctcctccccatctccgttggttctcgaagttttctcgtcaatttctcggcggacgatctcttcactccgaccacgcattccttctccgtgcccgattcgactctctggtttccggctctcaaaatgagaggtnacacatacatgaactgt

SEQ ID NO: 51107 - DNA, 581 bp, Arabidopsis thaliana columbia
atgatgcaattttcatatatctgcattgctcaaaatatgcttgttttgtgagctaagaacatagttcccacttaatacatgtcccaaaagttgtaccaagattaacaagttgctgagtaaatttcactaattatgctgcttgaattttttgatcaaactgtagacagaaatgtaaatttcactctcaacatttctgtttagaataacgtaggattagagattgccttagtgtggctttgtccaacttttctttccttgatttttttcttttcgatttagggtcagtcagagctgacgattcagaagcacttcccagaatggatgctaggactgcagagaatatagtatccaagtggcagaagattaagtctctggcttttgggcctgatcaccgcatagaaatgttaccagaggtgagggaataaatctacaattcaatcaattgtgtgaaaactgttggacatgattatagtctggtgccttgtttgattctgttatttataggttttggatgggcgaatcgtgaagatttggactgacagagcagctgaaactgcgcacgttgggttggtttatgatta

SEQ ID NO: 51108 - DNA, 1000 bp, Arabidopsis thaliana columbia
agaaattttcagaaataccttactacgggagagccgagacgtgcaaagcagaagagaagtcacaaactttgactttgagaggacgacgtacaaactacaaacgcagccgaacctatttctatttggcaacgagaattttagggtttcggaaagtaaatctgttcggtttactttaaggtaacttgggagaaaaaccaaaacgaaaatttagggttttggaaagtaaagcggtttggctaactttaaaattggtttggttggaccagttttaataaccaaaaataaaccacaccgaaccaaatcaaatcaacccataaacttaagttcgacaacggaaagcagttgatgatgaactcgataccaaggtagaggatgaatgttttgtgtgaggaatatagagaaaaatcattggaagagtaataagagagagctttgagaagagagcaaactagttgaagagttcaattatgtgcacaattagtttaaacattttaatgacttcgatgtctgaatataattctcttcaacatatatactcttatatcatttccatctacatgtgttcctcaacaacatatatgaatcactaacgtcttcactggacaagatatgagtgaaacaactctgtccagtaacatatgtataaattattacacaagtggcacatggtttgtaagagagagggagattatgagcctagcagcttcttccacctggcgtaaccaagagtgaccatgaaaagcacaatgcaaagtgcagtaacactccacacaaagtaaccaaagacgccatgtatgctatacaatggacatggtatgttcattccaaacaagctggccaacaatgtctctgcggctattgcaaacgaggctatggtcagcgtccgtgcagctggatcagttcgtttcgttgattatccagttgaatgtcacgtagtcttctgtgtcgtcaatgtactcctcactgtaagaatcttgtccgcattccatctagttgcatg

SEQ ID NO: 51109 - DNA, 446 bp, Arabidopsis thaliana columbia
tgataagttatcttttttgataatgagagttcttgtgtgtttgcagtgattggtggttctgttgaggatatgaaacctgaaatggttgaggataaggttgaaacaaatgatgaatataaagattgaagaggcaggaggtcccaaaagatctcaaggtaaatgggtatatccagttaataaaggttgcggcccctccaattaaggccactaatggatttgaattgggttcctcggcctttgggcctggtttgggtaacgagtagataatccggaaactatggaaggaggaacccgagacctgttgggtaatgaacagttgaggatggaaagtgccggatctccagaagaaagggataaggcgcataatagagttgagcgcgtagaatcactggatgagaacaaactcgcgaatcttgcggttgtagcacgtgaaggtataggggcta

SEQ ID NO: 51110 - DNA, 845 bp, Arabidopsis thaliana
tccccgggggactaagagactcagaatcaccagatgatatctactgttggcaaaaaccagaagacatgtcctacgaccgtcccgtcctctcttccacttcggccgctgaccttggcgcagaagtttctgcagccttagctgctgcttcaatcgtattcactgacaaaccggactacgccaaaaagctcaaaaaaggcgcagaaactctatatcccttcttcagaagcaagtccagacgcaagcgctactcggacggacaaccaacggctcaagctttctacaattcaacaagtatgttcgacgagttcatgtgggctggtgcatggctttactacgccactggaaacaagacttacatacaattcgccaccacaccgagtgtacctcaaactgctaaagcttttgctaatcgacccgagttaatggtaccgagctggaataacaaattacctggagcaatgttgttgatgactcggtatagattgttcttgaaccctggtttcccttacgaaaacatgctcaataggtaccataacgctactggtatcaccatgtgtgcttatctcaagcagtacaatgtctttaaccgaacttcaggtgattaattactctgctttactctgtttttcgtttgtgtatggtcttgaaaatgacttgaaccgttttgtggagaaaattttcaggagggcttatgcaactcaacttggggaaaccaagaccacttgaatatgtggctcatgcttccttcttagcttccttgttcgcggattatcttaattctactggagttcctggatggtactgtggacctacatttgtagagaaccatgttctcaaggattttg

SEQ ID NO: 51111 - DNA, 480 bp, Arabidopsis thaliana columbia
tagaggatcccaattcaatgatgtaactttaaacttgtgatatattgcaacaagaacattctaatatctgattctcttggtacagtacaagtgcgttgcgaccatgcctgtttcaccggagctacctcttgctttctttgaagatattaccattagaggaatggcgtaaaagaagcttgaagcttatgtattggaagtgttagttacctgaattttgggttgtatatatctgttagaatggcagattagtattgagtattatctcttttagcgtatgttcaatgattcttgctaacactagttaagaaacttttttttttttgcttgaccattttttcaatggtttattagatttttatcgaactgtttctgcttttcgctatgatgtaaaagcctctatagatcgtattggaatgtgcacatcctcttaacaacaacaaaaaagtacaacaaagactttgccattacatatgtgtgatg

SEQ ID NO: 51112 - DNA, 553 bp, Arabidopsis thaliana columbia
ctagaggatccccggtttttccacgaataaccgaaatccagatatccggtattggcggatcctgatattaaattactgatccatatactccaaaaaaccggatatccggattctttacaggcttaccaatgtgtgtggtgtataagcaaagcataaaaatatgtggtatccatgtactctagtcattgttcctcaacttgtgaactttaaccatgtctccatgtactcttgtctttgtctgattgcttttaatcaacctacacaaagcatcaaagatatatggtgtacaataaaagcaagaatttgtgctctggtctaagtataagatagtgatccaagaaaagacttgccatcctttttttctttttcttttcctctacttcaacttgcctgattcttttcacatgaacatgtccttcatatatttcattaacttacataaagatacaaacacatctgtatataaaaccaaaatatgacttgaactattctagtcaaactcattacacggaaacagaaagacccaaacaactggtacataacattggataaa

SEQ ID NO: 51113 - DNA, 603 bp, Arabidopsis thaliana columbia
agaaagacatgaggctagctcttgctcttggcgatgaaaacgcggtttccatgcctgtagccgcggctgcaaacgaggtcagttagttagttagttactcagagacaataacatattggctctccctcctctagattggtttcttagcttgaatcttaaaatatatgtttcggttctcgacaggcttttaagaaggcgagaagcttgggactaggagatctcgacttctctgctgtgattgaagctgtgaaattctcccgcgaatagcaaactgtttcaaaacatccactcatttggattggctgagatactgaaatcattgttatcttcccaaatagagatttactcatttggccaaacacacattttactccttcaccaaataaaaagtcttaaccacatatccagaaacgttcatagagttgcaaccttacgtttcaactactttatggctagttcactcgatattggtccagaggtagatcaaattgattgaaacagaaccaataaaatagagcaaagtttatttgaagttggtcactgttaaggttatatgaaacaaaggaacaaataagacccgtagatgagaagatcaaagaatac

SEQ ID NO: 51114 - DNA, 989 bp, Arabidopsis thaliana columbia
ggatccccgagtggtcaggttacctggctccgtacaagggaaagatttggcgacatatatcttgagaaagtctcgccagttaaaaattgcaacaatttcgattggatatgggttggatccacaacaaaagcttaagatggagatggatgtcaaattttctttccgtgcttcacccacatgcaaacgcgtattctattgagcattcatatccttatatatgaaagatatatatataccttattaattttgcaaaggacatatttggatttgttctattacagtttgtgttgcatttagtttagatgattttatgtgttgctcaagtcattaacaaaaaaataatatacttaaatagtccaaagcaacttcctctattcctccattccttgaaaactgagctgagttcctaaatgtttgttgaagagtcttggaactcgagtcgtcgtattcctctacgggttatagttttgccttcttgtccaaagaacattatttgaaacgatgttccaggtatttctcagttgcagtgatcattcgccttgttggtgagctaaaacatcggttactacaaagatggtttcctgagtctgaccagagtcctcggtagtagcttgaaacgcaagcaaccacgttcaattggaagttttgtttaagtaagtagaaataatgattgttgtaaagatacagaatgaaaaaagttagaaccgaacgacatcatattatacatattgcttgagtatatgataattttgacaagtagaagtatggtgaactccagctttcagatggttagactacaatggggaaccagatttcactatggagctacgacttacagcttaactgagtcaagacaaatagtttttggacattatcttacgaaagccgttttcacacgcattagcagagaattgttatacacattcaattactacggggatagtaagttttagacagtagccgctaaacagaatatagttcgtggtcga

SEQ ID NO: 51115 - DNA, 626 bp, Arabidopsis thaliana columbia
tggtggagaattgtgaggatgaatatatgaagtttaatctggattatgatcaggtatgttattttctcatcttccttaacttttatacaaacttataaacaatttttagctaaaattctttggtgtttctacagattgttgttctggacactaagacagcaaaggaagcaacattagatattctgaccacacattgcataccttctgctatgtctgatgatctcaagactgaagaaagaaactgaaacagaaggaaccataaccagaaggagagaaagagagatttttgtccatggaaggacataaaagcaaatacagtcatggaaagacaaagagaagctcaaaccataatttgatttttcttgattctgttttgtatttggaaaaatatgcaagaagaaatacattggttattttttctctcatttattttctttgaagtttgaacttggtagaacaatcatatatatccacacaaaaaaagtatgcaaaaagaaagtgaaatggatgagatataatcataggttcttctaccaaatacttcactttccattcatctatatgtcccaagtaaaatagtgggattcgtagcgctttgacattaagaaaccctagtctggtttagc

SEQ ID NO: 51116 - DNA, 453 bp, Arabidopsis thaliana columbia
gtgagttgaatttggatccactaactagtggtccaaccatggatctattgagcagcaaaaaatatcagttttttctccaggtacaccagattttgcttcttcacataccaaaataatgccatattttttttgtgggctgcctcatccaagtcacaaataacacttatttttactcgtccttactttctattatactttgatgttgcagcacctcgataccatcggtgttgccactcttccaaaaagaagtggcagccaagcactccgtattagttcccttcatcaggtatatatattctacattttctgtgtcaagtgtatccgactctgattagttttatgacagaatctaagcggttttctctatgctatcaactatttttgttttaacgtattttccggaaatgttaaccgcctacatgcaatataattcttttgtggtagaatatccta

SEQ ID NO: 51117 - DNA, 855 bp, Arabidopsis thaliana columbia
actgtgagctatgtcttttccttttgcagagtaagggattctttggtctatacttaggtcctgggaactcagcaagatcacacgtaatccaatggttattctaacgaaggcgtctagggcagagtcttgtcgatacaatttgaaaaggttcttcacactaggtgagagagtttgtcatcatggttgttgagaaactgagcatgacataagtttgaaaaggttcttcacatatagtgagaaagttcaagagatagaaccacaaggttagacataaatgcaagagtaaatgctcaagactttttgtacctcaaacaatcaagggatctggtagttgagctcttaaagcactatgaagccaaggggagaaaggagggtttggaggagaagttggtgaaagctcgaagtcctctgttgtcccacaccttgtgacatgacttctaaggggccgtcaacaccattggtcggtaagggcagtcatcgccggggatttggccggagggagatgccgtctatttgagaaatggtgggaaactttctgtttttggtaatagaaagtagctgagatctggttttttaaaaaaccttagcttcttttaggacatagggaagagtgcctgggaaagaaaaaaaacatacgtccgtacaccttaagaggggcttcttacacgttattattactattactactatttgtttacatgttatttttcttttgcgaggaaatagacagatataattttgtgttctttgtctacatttctaggtttagtatgatatagttaaataagaatattcaaaaattgaaaatctagtttttatataactgttgaaattagtctagcaacaagaaattag

SEQ ID NO: 51118 - DNA, 3648 bp, Arabidopsis thaliana
tgtgtttttatcacccaaagttagccacagttgtctactcctttgtttccaatgttcttcctcagccaagtaagcttttttcagatcttcattgatgttgttaatcaggctttggtcagaggttaggcaggtcatgccattctcaagctttaaccgatattcctcaatcttcttctggctatttaagtgcttctcacggctccaggcaataatagcctgtcggcaacggttaattttaagctcaacttcttcaatcaggtctctctgccaattctcttctactagttgggtaacttcttcattatccctgagcctcctatcatatctaaagagccctttccttttcttcttttgcaggtcgaaaaaagtaacaattggtctgtgatctgagccttcaaaaggtaagtacttgcttctacctgaagggtagttgacatcccactcactgtttgacatcgctctatcaagcctgcggaagaccacatgatcatttcttttacctctcccaagataagaagttcccagtgtaacggaggtcaaagaggtcacaagtggacatgaaggttcttaggtccacaaaggaaccctcaggacgagcagggcctcctgacttttcagatgagtcaatgatctcattaaaatctcctgtaaggaaccaggattctgatctgttctgtccaagagttgttagttgttcccatatctcctttctcttggatttctcaggttctccatagataaaagtggcaaagaaagaccgaccttccgcttcaatgaaggtatcaatgaagttatggttttctgataaattttgaattgatatctctttgttccagagaagggctaatccaccaccaccatgactatggggtgcgactagcttagattcagtgtagtttaaacattgaagtgcagtgagaacaacctcattttggttttttgtctccgagaggaaaattatatctggggagatggtcctgtgcatctcctttagtcgttgaactatcatgggattccctagaccacaacagttccagctgattatctttaaggaagaggagggggtggatttggaaaatccacctttttcttgactattgcaggtacaattgtgttgagaggaggagctacacttgtagaaggagcttagataatggctcttgcagctggttgctgtcttgcttgtttagctttgatgatttctctagcatcagctgtagatgatcctgcaacgtcagtgccaaggcgtcctttaggtgaggtatgcagacccatcagatgtcttttactagatttcactcctgttatccttagagggcttttattgcctggtctgttggctgccttattcaattggggtcttcctctctttttctttgaggttgggcctgaagcagctgggatctctgctgggtgaactggcagatcctgagatggactcatggaagggggccggtgagctacagaaagatctgggtcagcctgttgacatgccaagctaactgcagagaggatttggtctgcagtttctgtcataaggcctctagcttccccttgtaagactctctgttttctagccatactttcagtggggtctgcacaactagtgtactgcactgtaacttcccgtaattctcccattattgttttctttgtaggcaaagatactggtaaaggtgttgagacttcagtggtcatctctctttcaagtggggggcgtcttgttctagaggtttcagaagactcttgccatgtaagttctcttggtaacggtttctctctccactgtaaatttggattatcgctaatatgattattcctgctgaaagttctgggaggttctcttctgaaagaaggagtgtgtcgagggggagagtgtcgagagattggagatttgaagccatgggatcttgagtcagcttcgtggtttgttctcccatacatgtcctctgtctttctcttataggggttcagcgcctctttgtttctcgaaaaatctgaaaggtgagacgacccattttcctgagataacctgaggccttgattgttagatctgtggccttcctttggtttttgagctgttctctcagggggaacttgatttgtccttttatttgtctcgtcagcttttttaaggccagggcaatcaacttctacatgagataagcggagacaatggtggcaatggcttttcaaatttttgtagtccagactaactacaacttcactaccatcttggaactccactgttgtttcttttgtaagaggttgtaaaccgttgattaagactcttattttagctgcagatggggagatatcatggtccaccactttgcccaccttctctccaatcgcgtagagcatttcttttatccagtagtgcattggtagtccctggagctcaacccagaagggaatttctgaaggaaaggtgggtgaaatgatcggttcccatctctgaagaatgaccatccattggtcaaaatggtaaggtctattgtctaaaaccttttcatactcctcatactcaaatctgaactggaaacatcctcttcctaggtcagatcccgtagctttgcccttgagattccatctgtttaagaggaagggaatgagagaccaaagccgctgactagcagggttagtgagtcttcccatcaaagccagggagttctctctcatcagcgctgagttatccaaggttggagctctgattctcttctttggtggaggtgagaaacttctctcagaaccatgatgcctctcatgatatgatgtttctcgtctcccagactcttttgagagctctttgttgttactgttggagtaagatttctgattgtaggctatgcgttttccttttgcagcgtaaggtattcttttatccataactatgttgaggttggtagcacagttaagtgggcaacaaacccagagcttgtttgtgccgaagaagtatacaccaagtcttgaaaaagtagtcaaaaaagttcttcacacaaggtgagagggtttgtcatctttggtggatgagaaaaagagcatgacctaaagtttgaaaaggttcttcacatatagtgagaaagttcgggagattgtacaacaaggttagccattaatgaagacataaatgcacaattccatttgtaccttagggttcatgaaggcatgtggttgagcattaactctggtgtacacttcaggagatgggagagcttgctgaggtcctcaagggcgtctaaatttctcttaagcagcactcctaggtagaaagccgtctaaggttctccccacgtcattgtttggtcaaactccggtcagaaaagcaggggataagcctgagaagagccggagaagtagagccgatgaacaaaactttcatgttttagtaacagaaagtagctgagatctcctttttttgaaaacgtgaacttcttttaggacctaggtaaacgtgcctgagagagaaaatttcttgtaaaacttattaaatgatattctattcaattaaatgtaccctagcaagtctgataagtgataagcaagattaactcaaaacaaaattggatctaaaaccgtgtgagccgacggaacgagattgagcatgattgagaagaaccgaagctgccattgacgagtttagaagag

SEQ ID NO: 51119 - DNA, 660 bp, Arabidopsis thaliana columbia
  unsure (1)..(660): unsure at all n locations
cataacccaaggttttttattcacaatacaaagattacactttttatttacttatatatacatattataaagattacacatatttaacacatcaaaataacccatttgattgagagcaaacgtcagtcttcaggcgccgcctggacaacgacatgggcagcaagaatcaggtggagccggtgcacaacatacacactgtggacacatgcgaattggtggtgacggcgccatcagcttacgccctccaccttttcagtgaaaaataaaatcattaatccctctaaaaaactgaaagagagagagagtcatacatacagtatagtggaggatattcatagataactagcttacctcctagaagcacactagcggcttgacatggaagtattggagacaagacaagtgagagaacaaaaacatataggaggatgttggattttgctgacccggttttcattgcagctttaagatgtgtgaatgtgaaaatcttattgaactaaaccaatttgctgttgaaacttggaaccatggtgagaggatgattatatagccgggacgtttggtcaagaagaggacttagcaatanaatatttaagagattaaatctagttactattgaccaaaataagcgattagttttgatgatgcactatattttga

SEQ ID NO: 51120 - DNA, 481 bp, Arabidopsis thaliana columbia
cctatatgtataaactttctgatttgaaaatgtcattttttgtcatatgccactacacctaccgaagagccaaattaggacagacggtctaccaattagacacaacctgacaacctatattccttctacaaattatataaaaaaaacattacatgctcaagaaaagcatctcagtttagctatcacaatcatacatagtatattctaatctaaattattaatttttagatgtttctacatgtttttagatgtacttatttcatgaaaaccaattactaattttccagatgagggtgaaccactattcgattttacacactgaagaagactatcacaccgaatctgtagaaccagaaaatacagatcatgacattgcatcctcaagtgcacgtgaggattataccaaagccattactaatcgttttgcaaacgtctttagcaagctatctaaagtaaatgtatcatcaaaacatgaatctgt

SEQ ID NO: 51121 - DNA, 556 bp, Arabidopsis thaliana
tattttacttccacatcgaagttttagagaacagaaagaggagaaaattgaagtacacatgagacaagttacactttaaagctttattaacagattcttttaaaaacagagactgagagattgggagaggcagattacattaactctctttctctctctcactttctcatcttgttcccaaggttaaaaaacaattcgaggacatgtctttcctattttcagaggagagagccatcagcaccgaatgttgtcttttcactctcatcaaacttctccttccctatcttcatttcctcttctttccagagccgatggtaaggagctcgaagtttctaatggcatcctcatgcccaggccttgctgcagctgcagattcatagctctgtggaacccgttgggttgtggcatgacgtgaaccacttgaaaatagtcggcttgagtggttctcgcttggttcagctgatgagccaggtctggtgcttgatatcacacctctctttgaggtacttcctatttcgagactcgtgctgcaaatgaagccagcaaatcaaaacac

SEQ ID NO: 51122 - DNA, 1068 bp, Arabidopsis thaliana columbia
tgcagtgtgtttggtctcttcaacgttcccgctaaactgtaagctccattgtcttgcttgttggcatcttaatgcccacctgcatttcttgttgctcatatgatgtaaaagtttgtatccatgtgtaggtatccgtggatcttactaatagtattccagcttctcatgacaaatgtttcactgcttgggcatctatgcggcatcctgtctggattttcatgtatgattattgacctttttcattgtcatcttctttctaaacctgcattttcatggggagctaatttgttagtcgctttggatttcagattcttatggcctcttcaatttcttgatgcctggctcttcattttttaccaccattgagtcagcctcctggatggtaagtactaagtacttaagaagatctggcttcttgatgtttccttttctttgttaattgagaggccatcgaggatttaaaactcatgcagatctggcttcttgatgttgctctctgagttaatcgtaactcatccagtttctatgtcctcttccagtctagcttcattaggcgacccaagttcattatgtgtactggcgggaatccttccagctatattcccacttattctgcacaaaacacaacatccaggtgtggtttcctaagaacatatgaaaaactggactgtttgcccagagaatatcctaacgacattttttctttgaccagtggtttctctacaggaaatgcttggagatccttgtcttcatggttgccacagagggaagcatctaatcaggtacgttcatgctaatcttgttagtttcttttctttaccatggtggatgcattcacatctaaccatattacttcacatgcagtcttctgaggacagtagatttccggggagaggtagaactcttagcactgcccgagatcctactgctccagctggagaaacagacccaaacctccatgctagactgctggaagatagcagctctccagaccgcctttctgatgcaactgtcaacaccgtggcagattcaaggtatttgatttcttcagcttatgatttacagctt

SEQ ID NO: 51123 - DNA, 491 bp, Arabidopsis thaliana columbia
tgtctatgttataatttcataggttccatcaatttatttgctaatgtcgaaaacgaatctcagatttatgtagtgattaaagtttatctattctacgttttaccgcgatgaataaaagtaccggttgattcaccgttttgaattattccaccatttaccaccattggtaatggtataatacatgtatagtaaacatgtgaaatcaaataaatgaccataaaacttgctagaattgtaaaatgatagcaaatgttgtatccagtataagatgtaaaacttaaacaacctcagaataatgttcgatgatggatgtatataacgatcgacttacaaaaacagaccgaaatatttgctaatgaggtgaagtcatgtggtattgtttttggacacaatttagtaatttacacaaagtgaggaaaaatcatagttccgtggatgaaactcgtgccgttggatccaatgatcattactttaacgcagtaccacgtgac

SEQ ID NO: 51124 - DNA, 527 bp, Arabidopsis thaliana
ccgtcacctcctgtcatcacttcacctcctcccaccgttgcttcttcccctccacctcctgtggtgattgcttcccctcctccctcaactccggcgacaacaccaccagctcctccgcaaactgtctcacctccaccgcctcctgatgcttctccatcacctcccgcaccaacaacaacaaatcctcctcctaaaccttctccttcaccgccgggagaaacaccttcaccaccgggagaaacaccttcaccgcctaaaccttctccgtcaactccaactccaacaacaaccacatctcctcctcctcctccagctacctctgcttctcctccgtcttcaaatcctactgatccttctacgttagctcctcctccaactccattacctgttgttcccagagagaaaccaattgctaaaccaactggaccagcttcaaacaatggaaacaacactttgccgtctagtcaccaggtaaaagcgaagttggtactggaggtattgtagctatcggagtgattgtgggattg

SEQ ID NO: 51125 - DNA, 333 bp, Arabidopsis thaliana columbia
cttctcttgttctttattcagggttgagagtttcatagagcatcaacatacttgcaccatccggcaacctcaacacaccaaccaacgtcatctacagcagcacacgatgggccttgacgctccatcaagaaccacttcgacagcaagcttcggccctttattgcatggacttcctctgttaagacctccacgaccgtcgaatcaacattcaccagcttttgcttaccctttcaatgcttcatcagctccattcgaaagcctcgaacttcaactatccataggaatggcaagaacatcaggacaagcgaggcacaacgataagagagagacgag

SEQ ID NO: 51126 - DNA, 873 bp, Arabidopsis thaliana columbia
gacattgactacgacttgaaagaaacttgatatattacgacggtgacgagaaataacttgtcacgcctaaatgggaacaaagtgaaaccaaaaattgtttgtcgcttttagactttttttgaacatatgtagtaaatctgtaaataacatattttattttatttttacaaaaatatatgtattgtattagaaaagagttcatcattgtggatctacgtgagaagtatgtggaaatctaagtagaagcttaacacggtaagtggttacagcttcttcctcatgatcatcaatctcattaaacatggcgattccgcgagcaaaggcgaaagtacctgtccctcccactacctccataacctctttcaatttatgtgtcatgtctcggctcctaatgctaacactccccgtgtactcaggcgtctccaacgtcaagtatatcacgttaaaatccgagttagcgaagtcttcatgcgggattatgaacccctcagctttgcctacgatccttgaattattctcgggtccttccgtgagcgtgcgtcggaaaatcaatgctccttttcctcctcctctgccgtgaggttggaccatgtgctggctggaccggcgagaggagtaggaggaagatggggtgtgggtttgttgaacatagagggagaaggagaagaatgatcccggcgggtcgtaatcaggaacaggtgacaacaaagcgagtagaaggacaataatgaaagcagtggcgacacggatgaggaagatgattctagttaacatgatcggagaagaagaagaagagagacaaagaggagtttctaactgttcttcaacaaacctctttggttttaaagttagattagtgattttggtatacta

SEQ ID NO: 51127 - DNA, 707 bp, Arabidopsis thaliana
gtttttttttgcttctaatgagaggcgttttctggtgtacctggtagcttcccaagagatgtatgaccacaaacatgttggccacaatgacaagtgccgttggttttgttagtgattcgaggatgctctcttcaacactgtttccaaaggtcttgaaacctacaagtgccacagggaagtagcagaaagctacaatgatataggctacaaccgctcccttccacatgggtcgttttgatgggttctctggtgttgatgggatcgttgcttgaatttccaaaacaacgttatgacctgcgtacgcaaaagccatttcacccagtgcacttaagaaggctaatggcactgaggttgttctttttctatagccgtactctacactcccggtggtggcacccttcctcagcgaggctacccaagcaattgtagaatagctgtgcattggaaacaaacatttgataatttcttctcttgttcatgttatgttttcacgagatgaaaatagcaaaaggaaggagctacctgacagacatgacagcagctaccaaggagacaccagaaatggagttgaagttcttaagaagggagagcacgaactgtgaagaggcaaagatcaaaatgaagtgttgaattctaagctttgtgcacttgtcaccatctcccaaagcaaggtcatgtacattcttcagggatttacctccagtgac

SEQ ID NO: 51128 - DNA, 534 bp, Arabidopsis thaliana columbia
aaaaaaagaagactttacgataaaagtgaaaatgaaaagtaaaaaatgggacaggaccaggggaccataagcttcatcatcatggccaaccaaagtaaccaactaccatacattatctacttatagtcatatatctgtactttgacccatgagccacccatcaatatggttcagatgaacaattttcaatcctgaaactactttataaccaatagtattggtgaagcattgcatcagcttaatagatacaatgagtaaagggtaaacctatgaagatttgtgttcattctctcaaatgcctttgcacttgcaggagtctttgccttaagacctacctaaatagttctgagtcacacagagaactattacaagtttagaacagtctgttgcacttcccttacaccaaacaaaaattagacttttacataatgaggctagaatcaatctaacaagcttagtaagcaacagatgattactgcatgaagaaggtggcatgtcctacatgtttgatttctgaagagagagagtgatgat

SEQ ID NO: 51129 - DNA, 528 bp, Arabidopsis thaliana
gcagaactaaaaaacatgagcagtgaagcagagatactttttgtaatgtggagcatcccgatccaaccgcgcaagagtaccagccagtatggaaacctgcaaatcaacactccagttaccagaagcattacttatccataaatgcgtcttaatgcaccaaacatatattaaaatgcatttttttttgcaccctaagtttgacatttgacagaataacttgaacaatagatagacagttctgacctcatcaaaatttaaattgagagctaagttgagtaagtgactgcttttataacatgaaactgaaaaatacagtctaaaatatgaagtaatccgccatcctatgtatcttaccttttctccgctatcatttccaacaaccctaatttcgagtccaacagaagccgcctctggggcaagaggaatttcttggtaagtcaaaaactgtacagcactgggatcataacaaaagaagccaaagtcatggacctgaaaagaataccaaagaatgtcagcctgatgacaatg

SEQ ID NO: 51130 - DNA, 671 bp, Arabidopsis thaliana
atttgtaacagaaaaattatatcacaagtgacatattcttccctatgatcattcaactccaacaaagtcaactaaaataataactatttgtatcaattttattgcatattttggatacacttcctttgataagagaatacagatcaaaaaaccttttggcttccccacaaaccaacctcaaggatgtcaataccgcaaacgattcaacatttcacgcataatcatctcttaactcaagtcaacggtattggcacatacacttgtgatggttgcaaattgtacggtgaaggcaggacctaccggtgcagcgactgcgactatgatctccatgaatattgcgccacgtgtccttcgattctcttaaactcatgtcacggtcctgatcatgagcttagcctgttcaacggtcacatgaccgaacgctcgtgctatgtttgccgagtttctatccaagggatgttctacaaatgtaggcaatgcagttttgaagctcacccgctttgcacatacgctccaatgcatgcctcgtctccggatttattggttacgaagcagagaagcctgcatggccatgcgggacagccatcgccaccacaccagtatggtcaaggaatcccatatggctatcgacatatgggtcagcctgagccataccctcctcaaggtggtgg

SEQ ID NO: 51131 - DNA, 735 bp, Arabidopsis thaliana
caacaacgagacaaccatatcggtccaaaccttctaactgcaggaccaccagctcattcatggcatattcatatccccggtcacccgtgccattcggtaaagggacattcagattgtaacccaatcccacgtcttcaccaagttcatcaatcgaccctttctgcgggtgggacgatccccatgatccatggttcatatggagtgacaccgtaagaaccttatcagatgtataaaacccttcagctgtgccatttccataatgtacatcgatgtcaataaccgcaactcgggaacaagaacccgaattcaatgccagcttgacagcaagagcagcgttgttgaggaagcaatacccatcagcctgagtaggctgtgagtggtgacctggtgggcgtaccagagcatatgcaattttcccatggcaatcaagaatatgttgcattgctgaaagagttgttccagctgcaagaagagcagcttcccacgagcctgggctcatgaaagtacctgcggcaatttcacacctttctcctgatttatctgcctccactagcttctcaatgtactctgtacaaggatcacaatggattacatgagaaagcaataatcacaaatcaaagtcgaattttttaaggttaagatttgtcaaaactaccaaattcagaaacaggtttttataaaagttcgttcttttctgcgaaccttagagcgatgtcctgaagtgtgaacattaga

SEQ ID NO: 51132 - DNA, 605 bp, Arabidopsis thaliana columbia
taagtttggttagctcctaaacataaaacacaaaaacaaaaatggacaagaaacctacaaagcagtagcacctctcttgccagcgactgaaaatccacttccatcacccatcttttccattccctatcaataatcccaagcccattgttctttaacaccaaactttgatttacagagagcaaaaaggaaacgaccaaatccattttcattctacttcaacacgaaaacatttgttctaaatacttcaaaactttaaaaacttggccactccaaatgaaatcctaagagcagtaacactcacaaatggagagtaattagcgatcttgacaagtgcgtgggaaggtaccgttagagagttcgcagaaagctcgcagattaacattaaggtgagatgtgagtctcgctgcagccacaacattgtacagaggcaagaatgactctgtgcatcctagctctcccaaattcctgtacacgattacaaaacatgtttctttctggccaatgctatcataatctcaatatgataaaatcaaacatttttcaattcttatcaacgggaattagggatttcaattttagacatggtgaacctgggattagtgaag

SEQ ID NO: 51133 - DNA, 386 bp, Arabidopsis thaliana
tagtaacggccgacagttgtgctctaaagtaaacagtcatgtctaacggaatccgatccatcattccaccgtaaggtatgtagtgcagccacactatattgttgaatttcaacattgtcttccaaatcttctccagtccttctttggggattggctttttgacgtaatccgatttactctgtaaccctactggatccgtaggtctacctagaaggacggtcttcggagtacccgctggtaacatagcccaaaacaacgtcgtgttaagccagctcatttcttgacaatcttcacgtcttagccctaattcaggaaagctctggttcattatctccatcagctcatcggttcgacccaagaactgagcccagaatacaatcgcgatg

SEQ ID NO: 51134 - DNA, 863 bp, Arabidopsis thaliana columbia
ccacatcacaacctaactagtgcagtgccaaatagaggaaatttcaaacgttctcctcttcaacgatggctgcatcaaatattttctaaaggatcaatctaagctttaacaccaaacatctcactggatgcataaaatgatccattatcagccaaaaatacaaaacaagaagcggaaaataagagttaacgataagaaaaaccatcagcatttcaacaagaacaatagaattccactctcataatccaatctcactctcaagtcaacgagagaatctcttaaggatcttaactgaatatagcaaaccaacatagatcccatgagtatcctcgtgtactaaataccacaattctacataaacttactcccgaatagaacagttcataagtgcgatctacccagaaactcagtttcaacacgaaagcaatcctaacacagaacccaccataacttaaaaccgatacgaaagcaaacaccatctagaaacacacctaagctcgatccaatacatagctcaaagtgccacaaacatgaatcacaattcgagagaacaaaaaaaagaggagaaaagttcaaaaagggtttttgtaaaatcaccgtaatcagatccacgcattcaatttccgatcgaacttccgattgacgagtaaacgaaatcaaataacaaaatcgatctcactgcgaagatagattcagcaaaaatctcgatcaaagacaacaaagagctatgcgttttcgtacacacatacaaaaaataatcagagagtatttgtatgtgtgtacgtatatggtttttttaatagagctgggaaattgggattttatatagtttttgagggaccaacgaaagaaagagagtgatg

SEQ ID NO: 51135 - DNA, 618 bp, Arabidopsis thaliana columbia
ttcttcttcatcaccagtagaagagtctcattaccatacacacaagatcttccttttctccaactacatccttctcggcgctgcttcaagttgtatcttcctcacactctctctccgtctaatcccttccatctgcggattcctcctcatcctcctccacgccaccacaatcgccgccgcagtctcaggctgcgctgctgcatcttgcggaagaaaccgttggtacgccgctcacatggttgcaactgtgctcactgctatattccaaggctctgtctctgttctcatcttcaccaacacgtctaaattcctcgggagtcttaagtcgtatgtgcgtgaggaagatgctgctgtgattttgaaactcggtggtggtctttgtattgtgatcttttgtcttgattggatcgttcttgtgtgtgctttcttcttgaagtactatgcttatgtcgatggtggtgatggcgttgcgatgaagagaactggtaaggttcagagtgaggagaaccgaagactggccatggccgtccaagttaaagttgtgtcctttgtttgtggtgagactgttgagtagatcatacaaatgtggtttatggtctgttcggtgggtatatgtga

SEQ ID NO: 51136 - DNA, 604 bp, Arabidopsis thaliana
cgtctgtgccatttgttatcctcgatatgtacaatttgaggtctattactgttgacgtgtcaagcaagaaagcatgggttcaagctggtgcgacattgggagagctctacacaaagatcaatgaggcgagccaaacgttagcgttcccggctggcgtttgcctacggtaggagtgggtgggcacataaccggtggaggatttggaaatctgatgagaaaattcggaatcacagtggatcatgtcattgatgctcagttaattggtgtcaacggaaagctcttggatcgagctaccatgggagaagatctcttttgggccattcgtggcggtggtggtgcgagtttcggagttatcctctcttggaaaatcaacctcgtcgaggttccaaagatcctgacagtgtttaaggttagcaaaacattggaacaaggaggtactgatgttctctacaagtggcagcttgttgctaccaaagttcctgaagatcttttcataagagcctggcctcagattgtaaaaggaacaaaactcggcgagagaaccattggggttgtattttttgctcagtttttgggtccaccgataagctgatggagataatga

SEQ ID NO: 51137 - DNA, 294 bp, Arabidopsis thaliana columbia
tgccccacccagcctgacccgctggccccagtgagtcagtctcctctcagcccagatcagacttactaacttggagctgccaagaaaactctgagccacccctaataaaagccggcactcagccaggctcttatacaacccagccctgagtaaggcacctctcagcccagctactggactgtttacctgccttgtcttcttagtgcccaggtgtctcctggattcctcccctccctgatctccctgatgtgtgatccaccagtccaggggcctcatctgtccccattctggcag

SEQ ID NO: 51138 - DNA, 488 bp, Arabidopsis thaliana
tcccggcgctctttaatttcagagacttcgatattggaatcaatccgagtggtttgaacgtggatgaagctaagatctatggatacaagtatttcttggggaatttaaagagattgatggatgttaaagctaagtgtgatcctgataatttcttcaagaacgagcagagtattcttcctgctcgcgtaatgtaggaaataggaatatgcgcttttatcagatatagtatttagcaagtgtaataagttacgtgtggacatgataaagaagtaagaaaaaattacttggcatgtgttatagcctatgcaggtcatacagatatcaagaggtatatgctttttggcaaattttgcaaagaatttatgaactctgtcattagtcatctcaaacgacattttaagggatgtagttgtcgccaacaaatgaaatcgacaaaataggtttgacgatatctgcattagttaagtattaaaagcgtagtttaagct

SEQ ID NO: 51139 - DNA, 473 bp, Arabidopsis thaliana columbia
tatatgctaaatgacttaacgcaaagaccttaaaagctatttggaaaaaatattattgggctttggccgtaagaccatttataatggtataatataattcaacattttttttccttctttttcacattatttttgttatcttttccatctaataattaaacatatatatatatatactatttacccctattctacaattattttatttaataaaattcaacagtctatcctgatttttattaaattaaatgattaagaattaaatagtttattagcaaattaaattaaacagaaatagataaaaatcaaatactttttgtttattttatttgagataatatgcaatctaatacgattttctatgtgtccaaattaaaggaaccaaatctctatttatatagctaaaaaatgatgagttttgatataactgtttttaaaacattttctataaactaattgatctcaaggatata

SEQ ID NO: 51140 - DNA, 823 bp, Arabidopsis thaliana
tctagaacaccgatatggaaaaaatggtcaagattgtcaagttgaaattattgtctccatatatattggtattctataaattacaaagtagaggcataatgaaccaaacagcaaaatgaaagaagcactttttggtttgtatcttgttcttttggtttcgggcttagaagcagcagtgacgaaaccaaattctggaaactttattgaatgccttcggtatcaggctagtccggagaatccaatcaccgatgccatctttaccgtcgataacaccaccaccttcttgtcttcttacgtgtcatacacgaaaaacacgaggttctcgaaccctaacaacaaaaacctactagccatcgtagtggcgaaagatgtatctcatgttcaggccacggtggtctgcgcaaagtccaatggtatccagctccgtatacgaagcggcggtcatgactatgaaggactttcttacatgtcgtctgtgccatttgttattctcgatatgtacaatttgaggtctattactgttgacgtgtcaagcaagaaagcctggattcaagctggtgcgaccttgggagagctctacacaaacgtcaatgacgtaagccaaacactagctttcccggctggcgtttgcgctaccgtaggagctggtgggcacataagtggtggagggtatggaaatctaatgagaaaatacggaatcactgtggatcatgtcattgatgctcaaataattgatgtcaacggcaagctcttgaatcgagctgacatgggagaagatctgttttgggcaatccgtggcggtggcggtgggagttttggagtt

SEQ ID NO: 51141 - DNA, 478 bp, Arabidopsis thaliana columbia
ctgattgggtttgtcaatcccaggaaacttcatagcttttttgcttctttggtcaatattcgactagtaacaagttctttaacaagaaataatagcactaattggtagtttttttttgcctttctagccaatattaacaaaaaataatatattatagatgtcttatatgacaagtcactcatataacacgtaagttaagccatgaaaaatatacttttaagatatgatcaaaaatactgattggttggtcaatcccaggaaacttcatagcttttttgcttctttgttcaatattcaacttgtaacaagttcttttttttgtcaatcacaacttgtaacaagttctttttattgtcaatcacaacttgtaacaagttctttaacaaaaataatttgtagtgttttttgcctttctagccaatattaatctccattttcattaatgagaaatcctttcattattttcaccattttactt

SEQ ID NO: 51142 - DNA, 1246 bp, Arabidopsis thaliana
tgggagagctctacgtgaagatcgatgaggcaagccaaacgttagcgttccctgctggcatttgcgctacggtaggagctggaggacacataagcggtggagggtatggaaatctgatgagaaaattcggaaccacagtggatcatgtcattgatgctgaattagttgatgtcaacggcaagctcttgaatcgatctaccatgggagaagatctcttttgggcgattcgcggcggtggtggtgcgagtttcggagttatactctcttggaaaataaacctcgtggaggttccaaagatctttacagtgtttcaggttaacaaaacattggaacaaggaggcactgatgttgtctacaagtggcagcttgtcgctaacaaattccctgataatcttttcttgagagcaatgcctcaggtagtaaatggaacaaaacacggcgagagaaccatcactgttgtattctatgctcagttcttgggtcgaaccgatgcgctgatggctataatgaaccaaaactggcctgaactagggctaaaacatgaagattgtcaagaaatgagctggcttaactcaacgttgttttgggcagattatccagccggtaccccgacgagcattcttctagatagaccgtcgagtccaggagattttttcaaaagtaaatcagattatgtcaaaaaaccaatccccaaagaaggattggagaagctttggaagacaatgttgaaattcaacaataatattgtgtggatgcaattcaacccttacggtggagtgatggaccggattccagcaacggccacagcgtttcctcacagaaaaggaaacttgttcaagattcaatactttacgacatggtttaacgcaaacgccacaatgagtagcctgagtcaaatgaaggagctttacgaggttgctgaaccgtacgtgtcaagtaacccgagagaggccttttttaattacagagatatcgatgttggaagcaatccgagtggtgagacaaacgtggatgaagctaagatctatggatccaagtatttcttggggaatttgaagagattgatggatgttaaagctaagtatgatcctgataatttcttcaaaaacgaacagagcattcctccggttcgtgtaatgtagtgatatttctgttttataagtttatttatcaagttcaataagctatgtgggcatgtgttatatagtctatactgtatgtaattttcataattgtttcatttgca

SEQ ID NO: 51143 - DNA, 536 bp, Arabidopsis thaliana columbia
tcacatcaccacatcagatattgtcaaagacaattttgttttgtgaaatcgaatactctgaatccggctttgatatcgaggaaaaaacgcttgacaaagcattgaaagaaaaaaaaaatattagttaaaggaaccttatacattttatgaagtttttttttttgtaagcacccgaaataaaattgatgaagtttgagtatatcactatgccttatggtttttgccgaccaaaatatgtcgaaattatgaatacatatattttatttatttatttatattctattaacacccccccgggtgtaataataaaattaaacttctatcaattttaaagggaggattattaatttaaataacattaaatcatatatgatatataatcagataatattttagtaatcttaaaattaaattaagatttaaaaactgatatttagataatcataaagtattaacccacaacaataagtgattacaatttaaagaactactattagtttcttaaaatattttaaaagcgcatgtgttcgaaaaag

SEQ ID NO: 51144 - DNA, 420 bp, Arabidopsis thaliana columbia
ctgttgtgtctggatcaatgaaactaatgacaatttcaattttttcactaataactctcacctctgtttctgaactaatttcttaaatctataacataccccaaaatgagaaaaatggacaaaggtaagatagagagagatacaataaatcacacactaagctcaagttagtagttaaaacacaaacctaactcttttctatatatgaggaaaacaataaacatcagccaagaaattaaaaatcagtttttaactttgaaatcttactatgttaagaagcacacaaacctcccatattggatttctatatttgtatgctttttgtcattccttcaatctattaaccactgaattgagattcatattttgctcgtggaatcgacttctttgatcactgcgtgctcctcgtcatccccattc

SEQ ID NO: 51145 - DNA, 530 bp, Arabidopsis thaliana columbia
gattatcggcttcgcgtaaagcaaaactcaccgtcttgcgttcaatcagtccttcaacatacttgtacaaaccgcatttcactccctctttcctacaaaaatcaagaactgcctcttcgtgcaaaacattgatggctacaccgaatgcagaaactggccagtacttgtctcggagacgaacaccagtatcactttctttcttcatgaccgcacgagctatctttagttcagagctatactcagcaaattgagcgttaaacgctcttatcatagccgattcagcagccgtcctaccttttgatgtcgctcgcctctttagcttctcgctgcgttgcacttccacaacggcttcaataccggcttttgttttcatccattaaacttcgtagatttgacggagattcatctcgtggcttagaggacaaatccctagtgagtttgccttggctaacacgctatcgcgtatatgggaagatactaaattatataatgacactgaattgaggcgagtgtgtgaaaaaagtagacta

SEQ ID NO: 51146 - DNA, 477 bp, Arabidopsis thaliana columbia
cttagaagacacgaagggttagattagaaataatgacctaatggaaagactaaagtggaacaaaaagacacgtaagtgtctcaatggtccaaatccaatttgtttcgtccttcacaagactacaaacctatgcacatgttcgaacatatgaacacgacaacttctcttctgccactttgttattttcttttttttcaataaaaaaatcattatcgatggaaaatctgatacacggcatcaagatttctcctaggatttgaagaaattgtacgcgtaacctagaataaactatacggtgctctaagtcaagattttcaaaagattatcaacatttcatcaacaacaaatacttttgttttcttaatttattcaatatttcctaaaagaatttattagcttgtagtcttgtaataagttatactaaagtgaaagaggagatgatatttttaggaaattgttatagtaagtcaaccaagt

SEQ ID NO: 51147 - DNA, 870 bp, Arabidopsis thaliana
taggctacctggaatagtgtagatgttttactcgcttttactcgcagaggagactgaggtagaggaatctgtggatgattttggaaaagatggaagattggatttagatgacaatgaacctgagtatgaggctgaggaatatggcggggaggagtttgaagagagggaattgggacaggaggaccatgagttggtaaatgaggagggggaagaactggaggaagagattgaggtcgaggaggaagctggtgagtttgcagacgagattggagatggtgcggaggaccttgatagtgaggatgatgatgatgatcatgctattgaagaggctcaagcatggagaaactgttgatgtggaagaagaagagcatcatgatgttctccatgagaggcgtaacgtacaggagttcgaaatatttgttgggagtttggacaaaggtgcttcggaggaggacttaaagaaagtgtttggtcatgtgggcgaggtgactgaagttaggattttgaagaatcctcagacaaagaagagcaagggttctgctgtcttgcgttttgcaactgtggaacaggcaaatcgagctgttaaagagctgaaaagcccaatggtaatggtctacactttagtatttgatggagagtttgtgtagctttacattgtgtatcatgctcttggtcattgggactgcagataaatggtaaaaagtgtggtgtaactgcaagccaagataatgataccctcttcgttggtaacatatgcaagatatggaccccagaagctgtaagtatttgggtgtccgtagatatgtcaattaaacccaactccacagttcgtggtgtcctgacaatcagttatttgttgttgttccagtt

SEQ ID NO: 51148 - DNA, 589 bp, Arabidopsis thaliana columbia
cttctcacatacacacctatcaaaaagttaaaacctttcaaaacctcttggtatattcaaattaggattattcattcatgaaattattattgcaaaggttttgtgatgtcttataagatgattttggcagaagaggatgtaaattttttttttaaaagtaatcagcaaaatatatgtgtttttgggagtttttagataattaaatcacagaatagagttgggcatatgagtaacccattcgagttcgggtagaacccgttcgggtttgggattaatgggtattgatttactacctaatagaataattctaaatattcggttctggtttgggtcagatccagttgggtttgggtcagtttggaaaaagtttcagaccctaaaaatacccagaaaaatagaaacgggaaatttttatgtagatagcgagtgtccaaacaaatttttttttaaatttgttaagttttaataaatgtaattatatttgaatatattttactaaattttgacaaacataacaaatattttttgaatagtttagttgtcctggatatttaggtccaaattaattgacatatttatatttataatt

SEQ ID NO: 51149 - DNA, 550 bp, Arabidopsis thaliana
tgcatgtggaagaagtgtttgaattgtgggtgctccaaaaaccacttcaactcagactcttcaagatgactctccaataatccgactgccttatgaagataacactttgctgtaatcttgaatggctttgtataatcactcggaccgaaatacattttaagaggttgaagagcttcggtttcctcatcagaatcctgcaatcaagatagagatataccttagaaagcaacatagataaattagaaatcaagatagatatatctagtttatacatagatataccttttagttttgaaaatttctaagttagaatcaaatatagatatacctagtttcaatatagatatacattttagtttcatataatttaaaggtagaaatcagcatagatatacctaatttaaaaatagatataccttttagtctctaaaatatctaagttatattcgaacatagatatacctagtttaaatatagatatactttttagtttcatataatttaaaagtagaaatcagcataaatatacgtaatttatacatagatagat

SEQ ID NO: 51150 - DNA, 610 bp, Arabidopsis thaliana
  unsure (1)..(610): unsure at all n locations
catttggcgccgttgccgaagatctctttgagtcaccattagactaggtgtagaatttagactaagcttttatttttctttcttttgtttctcacgcattttctttcttctttttcctataacaggggagctaaaagatggaacgcaacaaactgctggcagatttcgacgacagtgtcgaccgacaccaactgggttgtcgatcgacaccatctgcaaacagacctgctaccataggcgacttcaacagagctgatcttttctactccaatcgatcagcgatcctgctacctccttttgcaagagaagactttgctattcaccctgcctaattatactcttgtttcacgaggaaagtttcgaggacattctgatgaatcaccactagatcatctagaagtcttcgaagatttagtgtcctcaatcaaagtagaaggtgtaccagctaattatcttctttgcaaacttttcccacactctctcgcaggcagaggaacatcatggctgcaacaacttgaaccaggttcactaacgaattggactgacatgaagaatgcattcatgatccacnttccttgatgattcattgacataattactgcgggagaag

SEQ ID NO: 51151 - DNA, 543 bp, Arabidopsis thaliana
gtggatccgagcttcaagcctgtaaaacagaaaagaaggaaactcggagtggaacgagcaaaagcggtaaacgacgaagtggataaacttttaataataggatctataagagaagtgcagtatccggattgggtggcgaataccgttgtggtcaaaaagaagaatggaaaggatagagtgtgcatccattttacatatcttaacaaagcttgtccaaaagacagtttctatctcccacatatagatcgtcttgtggaatcaactaccggaaacgaattgctaactttcatggatgccttttcgggatacaaccagatcatgatgagtctagaaaatcaagagaaaacgtcatttatcacggacagaggcatctattgttataaggtaatgccttttggattaaagaacgtgggagcgacttatgaacgtctgattaacaaaatgttcaacgagtacctcggaaagacaatggaagtctatatcgatgataggctagtgaaatcattgaaaaaggaagatcatattaagcatttagcagaatgt

SEQ ID NO: 51152 - DNA, 162 bp, Arabidopsis thaliana columbia
tagtggtttagggtttactcgaaaccacaaaattaataatagtggcgtgtccgaatggatttaaccatttttgggattcgaggaaaaggcaattattgccttggaggcgtgacacttttcttggtttgcgaggaaggaaatggcagccatcgcatttaagac

SEQ ID NO: 51153 - DNA, 603 bp, Arabidopsis thaliana columbia
tcgatctcttaattggagagtggtcttaaggcaatttgacctacatctaatttggcgtcgttgccgaagttctctacgattcaccattagattagtattagaattttgtctaagcttttgtttttgtttttctttttagttacttacattttctcttttctttttcttgtgtgttccaggtgtttgtctaatcacagaaccagaattaagcgagaaacatgaacgagagtaggattgccgggttaatggctaagattgacgatgtccacaatctacttgttgaggatgtcaattattttggtggaagatgtttctatgggaatggtccgactaccactcataagtctcagttccagcaatcgtgttagagtagaagtagaatcagctttacaaagaactacgatcttgcttcttaccaagccccccctccacccgcacaaagaagcaagatagaatcaatgctggaacagattctggaaggtcagaagaggatgttagagagaccaatccctagatggaatgagagtagcccactactgcttggcatgctgcttcgactggaagtggatatgagttcgtgaaggttgaggagagtgacaaatt

SEQ ID NO: 51154 - DNA, 537 bp, Arabidopsis thaliana
ttgaatttcaaactttatcttgctcaacatcaagccccttttgttctacggcgtacacacgaggtcctatggcttgcctcttaggaagtgtttggtttccgtcatttatgttccgctgattcccttccgctataaacgtagtgcactcccgtgcataatggcctggctgcccacacttcctacaattattattaccttccggacaattctccctgatatgacccacttcaccacactgaaaacatttgcctgaatccatccaacaaacccctccatgctgcctattacaccttgtacacttggggtaacggttctgacctggtccttcttaacggttatcccatgtacgcttttgagatccaactacctgagttgtcctcgcttgagtatttttcaagtacttagcttctagaacaagtccactctctatccttgcagccttctcaaccaagtctatcatgctgaaaaattctcgggaagcacatcgagtcagaatgtccggcctcaatcctctcattaatctacgaatcattgact

SEQ ID NO: 51155 - DNA, 573 bp, Arabidopsis thaliana columbia
taacttctaacaacacattcataaaaattatcttatatatattaatataaacatacacatcgttaggtccagtcatcctcgtgatgactagaagctcatgagtggaggctggccctcgtggctgagacactcccatcccgggctcgtcagcttttcttgaccaggtgttaaactgtcggtccatcactgtccacatcactagggagaccacggcccatagctcgattctcccactcatacattcatcatacatacatactcataatcatacttaacatacacatacttataatatcatacataacatcacattatcaaacatcatactgaacaatcataaagtcatatcatcatgtaatcttatcctatacaatcagatctaagcctacatatcatgcgtcaagaagcataacaaaagaaaatgataccatgcttcgcaaataccaccctcaccttagcctagttgaagatgaagactcctttcctttcacttaggcaatctttattgcaaccacatgctcataagctctaacttagtcaccttcaaccaagacctgaatccagaagtcatga

SEQ ID NO: 51156 - DNA, 1037 bp, Arabidopsis thaliana columbia
aacttctaacttacaaattgtacttctgtcttttactctgtctgattcagtcaaaaagaaaggaatattaaaatctctcaattttatatacactcactcaatcatacctttctctggagacctccacagggtttgtttccggaaatgtcgaacggcacggatcaggctcaaccaccaccggagaacccggctactccagtggattcgaagtcacggaaacgtgcgacgccaggggatgataattggcttcctcctgattggagaaccgaaattagggttcgaacctctggcactaaagctggtactgttgataaggtgaaaaaatctcagccctttcaattccttcgcagatagaatcgtccgtacaaatggacatgttatgttgtttgttgatttgaattggaactttttcttagtatttatgaaattgggtattgaagttaggttatgatgatcttattggtttatattttaaggtatttggagactttataactagtctttaagtgtaacgttgctgtatgtatgcttgttggatgaagattgctctgtttaggatgttgtaggtgtgaatatgataatgcagtgcttgatgatgtcttgtatttgtaatgtagttctactacgaaccgattacgggtcgtaagttccggtccaagaacgaggttttgtactatttggaacacgggacgcctaaaaagaagtccgtcaagacagcggaaaacggagactcacattccgaagtgagtttgttagtagacattaccttaaggtttaaacccgtgttttacctgaactgttgttgtttttgcacatttttgtagcattctgaaggtagaggaagcgctaggcggcagacaaaatccaacaaaaaggttactgagccaccgccaaagccgttgaacttcgattttctgaatgtgccggagaaggttacttggactgggataaacggttcagaagaagcttggttgcctttcattggggactacaagattcaagaatctgtcagccaagattgggacagagtattcacg

SEQ ID NO: 51157 - DNA, 510 bp, Arabidopsis thaliana
tctagtaacggccgcgctctaaaggaatcttctcgtcctctttgtgcagcgccagatgggtatgttcgcgcccggtgatctcgcccagcgcctgccacgctttgactgcaacatgaccgttggtttccggtgccagtgccagaatcacttctgaagcgtcaatggcggtgtcaatcagcggacgccctgtgccgggccatcacgcttggtgtaattgagtttgccgaggaaatcgatttcatcctgggtattccacgaaatccctttaccgccattgccaagtttgtccatcaatggcccgagcgaggtaaagcgttcatacgtagcagggtagtcgcgctccaccgccacaatattcggcgcggttttgcctggaatcagatcgcattcgcctttgcgccagtcgagcacttcacacggctgtgagagctctgccggagagtcatgcagtaggggttgtaatacacgtcggtttctttgccaagatgacccacgcacacttgcgaaaat

SEQ ID NO: 51158 - DNA, 548 bp, Arabidopsis thaliana columbia
ttttgtcatcggttttgttttgagctcaaaagaatcaatcttgcggaatattgtttacataagtgacataaaacgatttagtacaaattttcgtgccaaattgtccgttttaacatttgcattacaaaaaattaaagataaagagaagcttgtgaattcttccttgtcgctctgaaaatcctccaaatatgctgaaaacgccgactattcggttgaggaaaaaactatcttcaccaggtctgaacagtatataaaaaaggctacatcttggttgtcggcaccaatcatacactttatcgtccagagtagagtttcgacttcggtgtaaagtaaaaattccatgattgataatgaataatattaggttccaagtacactaatactttttttctttttttctatattttttttctgaaaatacttttatgggtgaattggaaaactaactagttttcaacactaaattaagaaaatagcactataattctagaaattaagaaactaacatatgagaactgggaaataccactttattcttatttaacaga

SEQ ID NO: 51159 - DNA, 464 bp, Arabidopsis thaliana columbia
actggataggactagatgggcgcttatatcatgggttgggatgtgtttaaaagaaaagggtgagttcattgttgataaggaaagggaaaaaattctaggggaagtaagctaaagaatttagaaaaaaaaaatgtagtaattgggaatgttaaagaaaagaatgaggttcttgttagctaaagaagaagggttaaaagcctttggttttaaagattaaaaacaggaaccttagttgttaaataaatccaaatccgctagatgtatcagagtgttgagaaagcttctcctagagttaagagaaaagaaaagaaggatatgaaaaagagtttaaaagattcacgagtgcaaagggtagagttaagttcttgtattaggattggagttgggattaccattagagcttcattgttatactctgggtagatgggatcttatctctgtaggcatagcttgggacttacctt

SEQ ID NO: 51160 - DNA, 577 bp, Arabidopsis thaliana columbia
tgttaattgttcgtctgttcttgaccaaaatataccagaccctaaaacatgtgtaacattttttgttgttttgttgtgggtgtgcaataacagacactctacaattgaacaagacttaatgtgaatggtataaaagtagcggaatcatataagtaaacgtaccttttcggaatagttggagtctagaagaagaagaccgacatggcctttaacagagagaatggtgggtaagaaaagccaatatttcttagggatcttcaggtacatacaagcgcttattacaccaataaatttcccagctatggttacaatcacgataataactataccgaggtaaaagcgtttggttaacgcgatgatgctgaatctgaatccaatgtaaccaaagtaaaccggaagaacaaactcgtgaatcgggtaactaagccgttgtatcaacgttctgtgagtctttccttgtcgtggaaacattatgccaatggcgaaaacagaaaccgaggaatttacatcgtaggattcgatagttataccgatgatgagaaggaagatgaagacactaaagtttcagcctttgaga

SEQ ID NO: 51161 - DNA, 641 bp, Arabidopsis thaliana columbia
ccctgagcattatgaagacgaaatggaccaatatacagcttaagaagagaagatccaattactggctctttccatgaagaaaccgtaccaaccagtgcaaatatgttggacccccgatcgattgggcctgtccatcgatcggtgggccttttcttaaacttccattctccctggtttagggctgcgtccctcctcttctatatactccttcatttctatagtcgcaacatactatttactttacgttttaatatagttttaaggtgttattctgcttccccattttttttatacttttatttatttattttatagctttagatctttgatttcttggagacaactcctttaatactctgctcctctcttacaatgatcgcatgtaccttagtcatgcgtgagtagctttaacatggaatatactgatcggtgagcatgactacaccaagtggtaccatttcgtttaacaacggttgaggaaccccaaacagatgcgtttttagatcccctttaggtgcatgctttagtgttataatttggttgtcccctgactctgggctgcttagctttggtcggaatacaaattgatcacctaagacaaaacaccactagtcttgctcataaggtactggatgaagtgt

SEQ ID NO: 51162 - DNA, 647 bp, Arabidopsis thaliana
ccatggattcgagcgtaatcgactttgtttttgaagcatcggagtaataaatggtctccgattgggtttttacacggcgaggattgtgaaccggttaccattacgatccggttttctgaaccgggtttgaaagatgggtgtgattcaaaccattggtttcgtttctcgtcccattttgtgattggtttctcgatcgagtagcttagatccgggtcgtcgtaaaaaccgggctcggatgggtcgaattgcatgtctaaaccggagcattgaaccggtttgccgtcgtgacgtaaactggtgaaagaaggtgaaaagattgagaagtaagaccagacgagagtgagagacatgaaagctccggcgagaaagaaaacaccgtctgataaacatacggcggttctggtctttgcgccgccgggttttcccatcggagatgatgagactgagattggctgatgaagtatagaaataattctttcagtaaaactacaatgaagtgattataaaagatgagaaaattcagtaaaccactgaaaacagttgggtgattaaagtaaagaaacaatcttttctgattaagggtttattgtcttaaatgtgaggcattagtcaacgtaaatgtatggttagagaatgggaaatattta

SEQ ID NO: 51163 - DNA, 620 bp, Arabidopsis thaliana columbia
tctgttataattaagactcctcactgagtcttctaacttctcttgttcccttaagtagacacgacatattcaacctttaactccgcaattcccacacgcttatgtttcttcgtctcatgggaatgcctcgaatgagtctgatccattttcttatagactttacttgtttttttctgacaattatcaacaaaagcatgtttgtgcttctaccagagaacaaggcatgcttaacccctttatttcttctttaaacagtttataaattaacgtaacacttgatttaaattataatctgattttattatgaggataggctatgcaattttctaaaagagtttttaataatttgatgatattttgtgatatgtatctaaggaaagtttgtagtataattcagatagtatataatatgatataaatagataataacataatatgattcacaaagtttgttataggtgaggtttggcacttcaaaatcaaaccatcatttggactaagcaaggctgcaaccttttagagatagatctgcacaccaaccaacatagttgctatgcgcgacgaaagacagaagataagtgaaggaatgaacatatattctatgaagtaaatctgaaata

SEQ ID NO: 51164 - DNA, 928 bp, Arabidopsis thaliana columbia
ctgctccataacgttttgttcacttttgattatcagggcacaactcctgatattaggctgagtgattcagggaaagggtctgatgaaatacagaaagcagactcagtttacaaacgctctaacgctgacacgcgagtgagtctgccacaacagagacgactgaaagatgtggtggaggcgcatagggtacgccgtgaaacagagtcaagattatggcaccaagagagggtaaaacaactaacttcttacacagtatcttttgtttgatttacgtgttcctttgattttgattctcaggatagatctctggtttggggaggaagtgaacccaggatgagatttgatgaaagtactcagggttggagagatagtgactatgaatccaaatggaggtttcatgagagaactccggattgggattggagagatagtgaatccagaatgagatctcatgaaagaactcaggataggagaggaagtgaatcccaaggggtatttgatgagagaacagagaggagacaagaaccagtgcgatggcccggtgaagagtgttggtgtctgcggtgtcgaaacggaggaagttgccgttacaatcatcctactcaacttccacaggtgagaaatgtttgacttagtctctaagttgcaattttactcttggcttactgctttcaaacatctttattaggagcttccggtgaggaatcgtttgcagatttgcagggtaagtgaagttttgtaactttatctaagagctattgtctggtttagtctttacttgatttgaaaagagattcgttgcagtattttctgaggggatattgtaagttcggctcagtttgtggatttcaacacataagggacagggatgttgcagaacctatgtatgaggtaacttcatctccaaggtaagaagccatctccataa

SEQ ID NO: 51165 - DNA, 337 bp, Arabidopsis thaliana columbia
cttagattgtacatctcaattagctagctatcaacttcgttctactttgtgttcagggttcagtttgttggttttgattaaaaacttctatttggttttgaggttgaatttaaatttttgaaaatgtattttatgaaagaataaatatatgcataaagaaaaggtaggatatatcaaaatttaaataggtcgctcatcaacttggttctactttgtgctcacaatttgttgttccgattaaaaactactgtgtttatttatttttgacgggattgaattttgatttctaaaatctaggtttgatatatagaacttatgaaggaataaatagtatatg

SEQ ID NO: 51166 - DNA, 547 bp, Arabidopsis thaliana
  unsure (1)..(547): unsure at all n locations
cagatacgcagtttatgaatatgtccataacctgaggaatagtaaatggatttacgctgttaaaggactcttcatggatgaaaataaatagctgtatatttgaatctgtggatatatatatataataccaaactaggcacgactgccttcaattctacaatatcccggagttccgatgaagacaaggtccgatcagcaccaaaatcaatgggcctaaaacaccgggtagataggttataattaagttaattaaaatgaaatgaaattatcatagcataacaaagatgaggaaagaataccaagtcagtgcatataaacgattaatcttagcaatgcggctaacatcatgaccaaatataaccgtcctactactcttggaggatgaaataagtgttacaggtttgagctgagaaaaatggaagattagttagaaataatctgacatatacactaaattcacgagtttttattaaaaagcactttcatgttttatataatgcatgatatntgtcctcataagcaaatgtttacatgcactttataatta

SEQ ID NO: 51167 - DNA, 572 bp, Arabidopsis thaliana columbia
cacatttcgcaagtgagtgaggaagaggaaagagaaggcagagagagctcttagacctcaatgcatgtctaatacctttgataggagagggaaagaagaaggatcaggtagaaagagcctgggtctatagttaggttcagaaaagcttggccaggctgcggggatgccccacagcaaagtttcccctgtgaggagttccgccttgggcagacctgccatgctgtggtacctctgcttgctgtgttcagttatgactgggagcaggctatggagcacagcctcagcgttaaagctacaggtgatcggaaggggcagcagctggaggtcgtcagttgactctgcaggtgcagcatgttcccttcaaggcagatcagaagggtgaacctcaaaggccatcacacttttaggaattcagctgcctacaaagaccacatgcatgggcacactctagatgatccctgagcaaaccacatgctgtgctcagagtatgaggaatgcaattgaagatcatgtctatagtcacctttaactatggaattttggttcagtgatctattcaaaagatacttatt

SEQ ID NO: 51168 - DNA, 522 bp, Arabidopsis thaliana columbia
ataacgaaattactgacaaaaataaaggaagaaaaattagaccgacttaggatttttgtggactctgacatctttgccttttatagtgaattatttgagtttcattacaaaaaaaaaaaaatatatatcgcctctttcaaggttggataaattagtttcttctcagatttagaagaaaaaaattaataaatagtaatttagtaaacgatagtctatgcaatcaaaaagttgaaaagcaaagaatttacgtacgtttgtttatttcgttcatcattgaatttagtttatggttttccgtggtacgaaccatgggactctttataaagaaaaaggactatggtacgactttgtatctttacattcatgtaatgcaggatatttgtttcatcatcacttacttttggtagatctataggaggaatatatagataatcatgttgttgacgtgtgctatgaggccagctatctacatttttttttttctacaaaaatttggatatctttgaattttcaaaaatatat

SEQ ID NO: 51169 - DNA, 555 bp, Arabidopsis thaliana columbia
cagtcaagttctttgcttacttctctaccttcaatagctaaattccatgatcctgggagtgcaacaattgtttctttacacatgagtcctctgactagagctagcacggatagccaaccagtggctcgtgagtctaggatctcaagcagccctcttggctcctctgggctgatgcaaggatctccattatctgatgattcttcgttacattctgattctggaatgatgcatgacagtgtcagcaatggagcggtccatcagccaagactgttggataatgctgtttattcgcagtgcgtccgagctatgtttgcattagctaaagatccatctccacgtattgcaagtctcggacggcgtgtgctttctattattggaatcgaacaggttgttgcgaaaccctcgaagcccactggccgaccaggggagtctgcaacgacatctcacactccacttgctggcctagctcgttcatcctcatggtttgatatgcatgcaggtagctgtttatgagtgttttatgatcataacttgatgcagaatttttcaaagttt

SEQ ID NO: 51170 - DNA, 519 bp, Arabidopsis thaliana columbia
cgacagattttttgaagaaggaacaatactttgttttttaatcatcaactcgaggtaaagtttcagattctcttatctttgttgaagaaaaatttcttaagcctggttgtgaacaaatagagacaactaattataattaatacatgtatgagttttaatgttaattttgttttatgaattatgttttttagagcaactttttttttgttattgaacttgttgatcaggaaatgttaagaacagttgcaagggagagtaatcatataagtgaagaacttttggttgagaaaaaatatgactcaataagggaaaacgaagcttcggccaatgaatttgaagaagaagatgaaatagctaacaacgaggatgacgttgtaactaaagaggctgctgctttagaggcaaataatgataatgagaagaaagatgacatatatattggaatggagttcagttctgatcagattgcatatataacttataaaaagtatggaggcaatcatggtttcaatgtaggca

SEQ ID NO: 51171 - DNA, 2076 bp, Arabidopsis thaliana columbia
tatagaacaagacaaaagatacacagataaaaataacttacatgaatgctggcattttgcaatatgctccagcgaaaacttttttttttcttctctttgggctgctatctcttcattagcatctgctccgccaagaagaggtttggaaaagtgaccacagctccagttgtagatagttgattgtggaagcaaactccgttcagacccgcttacacctaaaatcggatcagccaatccagagtcgggagaacccagcagatgaggtcggagctctagcgaacaaactctcctcagtccagttaaatagcttgtttgcggagggcttaccggaggagtcctaaatgttaacggtaggtggcctgtcaacataaatttcatggttaagttacttagaagtttataatggacaaaaacttcaagattcacatcaaatgatgatttaaaaacactgcataaccaacttacctgtatgcatgtcaaaccaagaggatgagcgaactaggccagccagaggagtgtgagatgctgatgctgcttcacctggtcggccattggacttggagggtttcgcaacaatttgttcaatcccaataacagaaagcacacgccgcccaaggcttgcaatacgtggagatggatctttagctaaggtaaacatagctagaacactctgcgaatagatagcattatccagcggtcttggctgatggacaactccattgctgacaccatcatggatgattccaacatcagaatgcaaggaggagtcatcagctaatggagatccttgcattagcccggaaaaaggttcttggaggctgcttgagatccttccttcacgagccactggttggctatcagggctagctctagtcagagaacccatgtctgaagaagcaactattgaagtcccagagtcatgaaacttggccattgaagggagagaagttcgcagagaattttggggcttccagtatgaatctgcaactgactttagatgttgtttgtgtccaaaagcaaaccgtgcgagagctgtgagacaataacaacatgttgagactattcagaatatacaatccaagcattagtttcaagctttctaagcggaagagatattagttaaaaaggttattaattttagttaatatagacactagagatcatataatacgactaaacatgtagtttatttttcctttgaacttgatgacacatgatgcaaataatgctacaattaagcatgatgatcaaacgtcaacatgttttgcatacctacagcaacctctgttcggacaagcgggctcccatctgcaacgtacgtctaagagactttttatgatagtatcttcaactatgttttcatcatcatcaagttcttcatcacgaacacctttgccagagtcagacccagcatccagtaaggtagccaaggcaaaaacagcagcagccctgacctgcaagagattggtgtggccaccaattagactgctatttcaaagcaaaaacagatactgaaatcttataagttagctaagattctggcgaagaccacctcaggttggggctcggaaagcagaggtgccaacttttcaaaagcatttgcctccctgcccattatttgggcctccataaaatcttcccataactttccaagacaaagacaaagccattgtagaaacaatggttctggttgtggatcacttggtctggatgcttcaaggtgcccgagacaaacaccaattaaattagcttcaagacatgcttcctggcctcgtcgatgtccatccacaatgacagccagaacaaaagcagccatagctcgttgttctggaaatgcacccgagctatctagaaatcgtatgaagtatgtatgccccccatccttcacaagatcaatttgacatgactgaaaacaaaagagaccagtcaatgttggaataatccaagaatgaaacgagaaaacttatgcatcttgaaagtgtgacggccataggtaagcaacttgatccgatgtccaaggatatgatataaaaaaatgtagagaaatattaggtggtaaatatatggggagtcgac

SEQ ID NO: 51172 - DNA, 493 bp, Arabidopsis thaliana
tagctaattttcttaagcatagctctaattttcattggaagcccgtaaagacgaataaacccggctgcatccgcttggtctgtagatctcactcccttcaaacgaagatatgtcctgtctatacagactgttaggactctgacgccctgtaaccgacacagatcctttgtacagcttcagtgtcacagatcccgtggttgtctcggttatcttctccatgaaagcgtccatggactccctaagcggatcaaaccatcttcctgcgtagaccatctctgcatatttcagtgctaatgtgtcttttacctgaatactctctctgtctagagtgagggattctagttcctgtacagctgcaaagaggatagtgcctccaggagtttcatacacacctcgtgatttcatcccaaccagacggttctcaaccatgtcaatccgcccaatcccgtgctttcctcctaatgtgtttagctcggccagaagtgtggctgga

SEQ ID NO: 51173 - DNA, 327 bp, Arabidopsis thaliana columbia
taaatcactccatagagtacacgccaatcgctatccactatttattataaaatatacaaaataccatatgacagaagaatttttattaaaatcataaagggtacgtggatgctaaccccaaattctttaaccccaaatcctgtatctcataactcaattgaccagtatccaggcccttcgccttaatgctatcgagacttcccacatatcactgatctgtcctagtacatcgtgcatctcgcatcacgaataacgttagactttagctatcgcgtatagctaagcgaaaataaccattttacgctcacgcagttacaacactcgaga

SEQ ID NO: 51174 - DNA, 771 bp, Arabidopsis thaliana
tcgaaatctgaagtggagatatgttcctatcgaagttcactatgaatcttttggtaactatcatgagatttatgcacactatctaatagtaagaagtgtaaaaggtggcccatgcaggtttcgaacctgcgaccttcgcgttattagcacgacgctctaaccaactgagctaatgggccttggatgctaacacttaaatgtaaaatttaattttcaattaattttcttttttaaggctttcaagtagtagatgcaaagaaggcccggcccactaggtttttgtccaatgtccaattgatcttcaacaacatttttcttttatggatgctgttctaagtatacagatagaaatcatataaattttttctgatttggtcctgataaattaaaaatcttaatcgatcctttagagcctgaatcagaatgtacgtccctctcagaaattaactcatcatatgtaagaatgccaatactagaggttttgcttcaacttcaggactaggatgcagggaattatccaaaaccacattgagcacagtctgctttccagtatacagtttgaaattacaagttatggtttctccttgaaggccttatgttatatgaacttggcatctttgctgttattttttaatatcaagaaatagttatgatttcataaacttattttttttgttagttcaattggtttatcacttggtcttagcagattgtgttatattattagagtatctgtagattcacttgaaatgtagtgttccctagagtcaa

SEQ ID NO: 51175 - DNA, 1929 bp, Arabidopsis thaliana
tatcattagaggcctccctacccccaccctaatagaactcaccttgtcctcaaggtggaaattgggttactgagctgaaaatggtgttgccggttcccaagtatcctctgatgctggcagcccttcccagcctatcaacacttccacctcgctgtcaggagatactcgacgaacagctttaaccttctctggcttagtgtcccagacatttttcggagtcacaatcgctggcagatcaatgattgattctccagttctcactaccttcttcaacaatgacacatgaaacactggatggatcaaactgtgagtgggtagcttgagtttgtaggctacctttcccaccttctgaatgatctcatatggtccaaagtagcgaggagttagcttctaattccttctctttgccaccgaagcctgcctgtaaggtttaagcttcaagtacaccatctctccaaccacatattcgacctctctgcgatgcttgttagcctgagcttccatcctcttctgggctacctcaagattcaccctcaactctttcagcaactcatctctgtccacagtcatcttctctaccttagcgttagtggacggcacatccttatatctcaaaagtcttggtacctcacgtccatacacagcttgaaaaggggtcatcttgattgcagaatggtaggacgtgttgtaccaatattcagcccaaggtaacaacttcacccagttctttggcttatcctgcaccaagcatctgttggttttaaggagacaacaagccggcaggagacagtgtggagtatttgttggtttgacacacttgacattccttaatgaactttgtgatatccttcttcattcctttccaatatacttcccttgacatcctcttgaatgtcttaagaacaccttcatgccctcccacaagactgctatgaaactgttccattaactctcgggtaattttcgatgctgcaagtatcacgagtctgccttccatatagaaccgtccgtctctcatctcatacccggtgtcagtcagaatcccagccttgtacctctgtataattttcttatacaatgggtcctgttccacttgctcagctaactcaaccaaataaacacacttgggtgcagtcatctgtaacatacaaacctgctcccccagcatcctagacaatgcatcagccaccttgttctcaacccctggtttgtaccaaatattgtagtccagccccagcagcttatatgcccacttgtgttgatctcccgaaatagctctttggtccaacaagtgtttcaaactcttttggtcagttttgatgatcaccttctgacccgcaaagtgatgtttccatttggtcaccgcaaacacaattgccaacaattctctctcataaactgacttagctttacccttctcagagaatccttggctgatgtaggcgatgggtctcttgccttgagataacacggcccctatttctgcgcctgacacatcagtttcaatggtgaatggttgtcggaagtctggcagcatgagcaccgctagctgagtcaccgcctctttcaatgcctggaaagcttcagtagctttttcagaccacacaaaccccttcttcttcaacaagtcagtgagtggtcttggtatcttaccataatccttcacaaatcgcctgtagtatccagttaatcccaaaaaacctctcaactccatcacgtttttaggttcaggccatttgaccattgcagccaccttctgtgggtctgctgacacaccttcgtcagagatcacatgccccaagtaagccactttctgacatccgaaactgcacttcttctcatttgcttaaaatctctactgcctcaagacttctagcactatctccaaatgttttttgtgttccccaagctaggactgtacactagaat

SEQ ID NO: 51176 - DNA, 531 bp, Arabidopsis thaliana
cattgactgtgataaaaaggttgtaaatctctgccaggtccgaatagttgagtaagaatcattcaggcctgagagaaacttaaaaatcttggcatgcttggcaacagagtaagtagcagtacaacatttgcaattttggcaagtattgacacaactagctccatccaagtcatcccacagattcttcaatgcggtgtagtgcacttcgacctaaggacttggttgtcgaattggaatttcccgtcccaatccagaggaatcttgaagcacacgtaaccgcctcgagggcacttcaacctaaggacttgaaaaaagtcaaccgtggcgtgacaaagaagcatgccgtcgatccggtggtatgcgcactttaccagaaacaaatattcaatttttagtaacgagaaagttatatatcctaattgaataaaaggattttgtttttacattaacctgctaagaagcacaaggtctcaggtttgtaagaccttgctctctgaactttgctttcaaagttgcgatagagtcttgagc

SEQ ID NO: 51177 - DNA, 534 bp, Arabidopsis thaliana
tcgagaggcttttactcgtagcgatctcagtgttccagtcaacgatcagatcaagatcaaaatgagcggtctccataggaagtaacctcgcctcaacttcagcctctatgtattgcacgtgaacgttataagcgtcttccagatcgatgaggggatcgaatcgatctaggtagtctacatgttcttcaggaagaacagctgggttttcatcgggaccctcccgatctgattcatctagcagcgttggaatttcgatctgattagctcgactagattgaacctcatctcttcggttttcagcaaatcgagagttgtggcgaactaacattgtttcgctctcggaagaagaagaggacggagaaacaaggatagctttacccattatcggaaaaatcgataaaagaacggagaacgcaaaataattcgcagagggaagaacgagagctacctttgattcttcttgcaagcggtggaaagtgatatttcgagggtttagtcgagtataaataggaaggaatgggcggcaacctacga

SEQ ID NO: 51178 - DNA, 456 bp, Arabidopsis thaliana
tttttgctctcttctagcacccttatcgctttgttgcgatacttctgcagtatgcagattctgtcttgatttggctcggcttgaaattgtctcatggtagcttagacatagttatttgtttcagtttaaccggccagctgcccgaaacttattggtttttgaaaataggagtatcactgaagctaacactttgtctaaggctctctgtgttgcgaacgtgacttgtaaggctcctaaacgttgcatacctacaactctacctcttattgaggcggctcccctgtctttaccttgtattgaggttcgttccaccagcattcctcggtctgaggctctttctcttgtcttacctcagtgtgaggattttacttgtttcacggacgcggcttggaacacgttctctggctcctgcggtatgagatggatttttaaactcaacaccaagagttatcacca

SEQ ID NO: 51179 - DNA, 503 bp, Arabidopsis thaliana columbia
ggttctactcgacccaatgatcgagtagggcttttcagtttttatttttgttgtttgaatcctgacctaagattgttactagagaccaaccatctctataatctggcttgacttagttgcttctgtacacatcttgattgctagcaataacagtggattggattgacaccccctatagctgcatcgacatgttagtgtttaaggggaattgaactgaacacatcacacttcagcacataagtaggcgtaaaaacctacttatcacccttaaagggatcaagcctttcatagttcaagttacataataggagatcagagtaccgatctttttttttttctttttcttttattgcaaaagtaaactagaggctagtaataatacttctttaggtggactacgttccacgggttttgcacttcctcgagcttcatagtcatgattaggtagaccgtaggatgaacaccttcgagatcatgtgaggcccttcccacgagctccgagt

SEQ ID NO: 51180 - DNA, 775 bp, Arabidopsis thaliana columbia
caaaaattaggagaataggagaatagggcttagagagattaggagaatagggcttagagagattgattatttgatgaaatgttaatataaaatttgaatgttttatttttaaattttaagtcatttaatgtgaatttggtattatgtaaaactaatttatgagctgactatagtaaaaaaaaaaaaatgtgttcgccctaattattctctcccaagcacggaaaccaaggagccgcttcccttagaaatatgagcttctttctccgacgttcctcttctggtatcttccttgtctgatcggtgctagctgctaaggcgagatctctcaggcggacctcttttttggcggcgttgctgtttttcggtgagactttccacatgagatgactttctttcttttgacttcgagccactctcatcgttttccgatatttttggttgctttccttgatctgaggcctcctcctgctctaccactggagtcttcttctccgccgactccaccagaaccacctgaccccctgaccctcagtctgcctctccattattgtatctcttgctcagtcaccctcgacgacgagaaaccgtctcctttctgcaaagtcactcaatagctttggagtgctgcgtctcgacgagtccttctttccacactggtttggagagatggtcccccaggtttgcttgtccttctcgttctctaattcttctaatatgggaaggaatttgtttcttgaatgtgcggttctggtttggtggaactcggggttaactc

SEQ ID NO: 51181 - DNA, 526 bp, Arabidopsis thaliana
ctagacgataacaatgtccggttacgaatctatgctcgatttcacattaaaccaaacatggactcactaatctgcatcaaacgaaccacgttctattctaccatcattttggaaaatctattctgagtaccatccatttattctgagtaccactcggccatgtgtaattacatctctctccttaatgaataactgagggagaattcaaaataaagagtaaatcatttagtaaaaaaaacaaaaaaaaaaacggtcgttgctcccgcgattctctccgacgacttcggacgtgattttttccgacttcgccgccgggaccttgagctccgatttcgccggcgatttgagctctaattttaccggcgagttagcttccaatatcgccgtagcttccaagccgataatctgctcccaaagtgagcttcctcttcaacggcaaaagtaaatccgatctcgttttgatttgtagattaatgtgaatttcttgttggagttagttgttcataacataaaattgttgtattgt

SEQ ID NO: 51182 - DNA, 1804 bp, Arabidopsis thaliana
tgaaataaataaatatgtctaaactgccatgagacaaatttaaaccgagctaaatcgagacagaatctgcatactttagtaagcgatcgcaacaaggcgataaggatgctagaagagagcaaaaatgtagacacaagaatatctaaacccatcgaaatcgattgagttaaccccgagttctacaaaacaagaaccacacattcaacgaacataaaattccttcccatgttacaagaagtagaggacgaggaggacaagcaaacatgggggaacatctctccaaaccagtttgtaaagagggactcgtcgagaagcagcactccaaagctattgagtgactttgcaagaaggagagggacactcgtcgtcaagggcgactgagcaagagatacattaaaggagaggcagatctgagggtcaggggggtcaggtggttctggtggagtcggcggagaagaagactccggtggtggagcaggaggaggcctcagatcaaggaaagcaaccgaagacatcggaaaacgacgagagtggcttgaaaacatatgaaagaaagtcagctcaggtgtctcaccggaaaaagagatccgcctgagagatctcgccttagcagctagcaccgatagacaaggaagctaccggaggagctacgtcggaggaagaagctcatatcttcaagggaagcggctcattgaattccgtgcctgggagagaatattagggcagtgcatgtctagttaattttaagtttgatagttagaaaatatctaggtatggaatctaaaatacgagattggtgaatatattattttaaagctactaacctatataacatccacaaacacagttgataaacgcattatcacacacattatggagtggatggacgctcatttagtagtagattattatttgtggatcggtttttcaagatatatataccgttttgctttgtttgtcaattatgaaatttacatctgtagaagaagaaaaaaagagttgaattctgaaaatatattcttgaattatattaaacagtacaatactaacaaactgcctacaataaaaattggttcgatagaacgaaaagactgtaactgaaacatgttcacagtacattcaccactagactacacaaatatatataattagctatacgaaaaatttagttcgatgatcatggttatattccacagatgatactagagatgttaatgatgggttaaaacccactgggtacccaaaacccacataaaattttgagtccatagatctattttttctggaaaaaaaacacaggtttaaaatgggctgggtacccaaataaaaaaaacccatatgggtttacctatatgggtttacctcattgggttatgggtactcacgagtttttttaagtcccttttcaaatgaatcaacattttcttgtcaaaaaagatttcacattttttcccctaaaccgcgatttaacagtttaccgccaaaaaagacattcaacattttcccgccaaaaaagacattcaacattttcccgccaaaaacgataatcaacattttcccgccaaaacgcaattcaacattttcccgccaaaaacgacaatcaacattttcccgccaaaacacaattcaacattttcgcgccaaaaacgaccttcaacatttttccgccaaaacgcaattcaacattttcccgccaaaaacgggattcaacattttccgccaaaaatgatttcacattttccagccaaaaatgcaatttaacattttcccaccaaaatcgacattcaacattgtcccgccaaat

SEQ ID NO: 51183 - DNA, 334 bp, Arabidopsis thaliana columbia
tcgaggtttgacatttgtataatattaggtggttaaatgttttgctagaacccgcttataatctatgagtcagaactcattgctaatattgtacaaacctacaacgtcacacacctacgcaaactggattaatgttggattaataataatataatatatatgtatagcctgttcgtttggttaccgcttgcgttggcggcacgacagcgcagcgacggcggcaaacactaccgcaggttgttgttcgtttcgtcgccgcagacgctgcggttgccgctgccgccgccgcaggcttatgttcgtttagacatcgtttgcgctgacgttgccgcta

SEQ ID NO: 51184 - DNA, 1710 bp, Arabidopsis thaliana
agatctgcctctcctttaatgtatctcttactcagtcgccctcgacgacgagaaaccctcttcttcctgcaaagccacgcaatagttttggagtgctgcttctcgacgagtccctctttgcaaactggtttggagagatgttctcccaggtttgcttgtccttctcgttctctaattcttctaatatgggaaggaatttgaagttcgttgaatgtgtggttctggttttgtggaactcgtggttaactcaatcgatttcgatggatttagatacttttgtgtttacgtttttgctctcctctagcacccttatcgccttgttgcgatcgcttactgtagtatgcagattctctctcgatttagctcggcttgaaattgtctcatggcaacttagacatagttctttgtttcagtttaaccggccagctgcccgtaacttattggtttttgaaaataggagtatcactgaagctaacactttgtctaaggctctctatgttgcgaacgtgacttgtcaggctcctaaacgtggcatacctacaactctacctcttattgaggcggctcccctatctttaccttgtattgaggttctttccaccagcattcctcggtctgaggctctttctcttgtcttacctcagtgtgaggatattacttgtttcacggacgcggcttgaaacgcgttctctggctcctgcggtatgggatagatttttaagactcaacaccaaagagttatccatcagggctcgtcttctcgacttcatacaccttcggccttagctgccgaagcccttgcgattaaatcggcgctgactgcagcgttgcgaatggaattcacctccatcacagtttgctcagactctcaagtcctcacatctttgctcaatacagagaccacatcgaatgagcttcaggggatacttcatgatattacatgtttgtgtcgttcactcctatcttttaaattctgctttatttcacgtttagctaatgtttcagctgatgcaacagccaaagaggctttgttttctttggatttccctgttgtatgaaccttttaagattacttaaatgaagattacaatttaaccaaaaaaaataaaaatagaagattacttaaatgaagattacaattccaccaatttgttttcaccacaccacaaaccatgaatgaagttctccgaaaatctgttcaggatctcgatttgggaattgatgatatcccaattgctttgtcaccggaatttgtttctcaagcggccgctgtcaaccgcttctcgctaattgtcaccacggtgaacccaaggaagcaaaacctaagagcgttaattggtcagatgccaaaggtttggggttttgcagaccattgtgttggtcggattgttggtcaagggaaagtccaattcaagtttcaatcagaggaatccatgaatctggttctgcgtcgtggtccctggtctttcaatgactggatgttgtctgtgcatcgttggtatccaaacatcacagagaatgagatgaagatcatacccttttgggtccaaatcagaggtattccgcttctctacttgactaatgcaatggctagagtgatagggaatagattgggacatgtctcagatgtggacttagatgagaacacaaaccaaacgggcttcattagggttaaagtggcttggaacttcaacaatccgttgcgcttcc

SEQ ID NO: 51185 - DNA, 556 bp, Arabidopsis thaliana
cctaagttcaagtatagtgtttggaaagttaaatctatggagtattaggtggggtacttgggagacgctcagtggatgtggaagagtgagtggccatgaattccaagaattgcggatcggtttggcggagatacttctcgactaaggacaagtgttcgagcttgtccttttgctcagctatgactcgggctgactcagcttctcgggcagcaatctccgcatcccgcttctcattatatgcatcatgctcttcaattttccgttgagcttcctgcagccgttcttctaaggcttgaaaggatgctgagtctccagcgagttggcggttgacggttggtactgcctagagtgtctttcagacatccaagtccataaggattgcctcttgaatccctatccgtggactgcaagaaatagagaggaagacaattagtgactaaacgtatcaatggactctaagactctgaattagactacaacatcttacctcgagaaagatggctgtatactcatctactgtgagatccgaggtcgtgaagtgccacagagacagcag

SEQ ID NO: 51186 - DNA, 2033 bp, Arabidopsis thaliana
ctcttcacacatgtatgcatctcgctgctcaagctgtgtgcgttacgcaatgcaaaaccctggctcatatgttaacagtaacattgctgggtttgtgaatctattagaagtatcgaaatcaccgaatccgcaacctgctatagtctggcttcctctagctctgtttatggtctgaattcgaaagtacccttttcggagaaagaccgtaccgatcaaccagcgagtttgtacgcagctacgaagaaagcaggtgaaggaattgcgcatacttacaatcacatctacggattatcgttaacgggtttgcggtttttcactgtctatggaccttggggtagaccagatatggcgtatttcttctttactaaagatattcttaaagggaagacgattactgtgtttgaatctcctgataaaggtagtgttgctagggacttcacttacattgatgatattgtaaaaggttgtttaggtgcgttagatactgctgagaagagtactggtagtggtggtaagaagaaaggtcctgctatgtttaggatttataatttggggaatacttctcctgttcctgttactaagcttgtgactatattagagaagcttttgaagatgaaagctaagaaaaagatcatgcctctaccgaggaatggggatgttgagtttactcatgccaatatcacgttagcgcaacgcagagctcggttataaacctgcggttgatcttgagacgggtttgaaaaagtttgtgaaatggtatatgggtttttacactggctcgaagaagaagagttcttggtgagctctgtctctctgcttaagtcatggtctctgtttccccttgttgagcttggagttcgctctaggttaagcttttgaaaccgagcacttgcattgccaggaaaaatcacttacgtatctgcattgtttctgtgttgctagattttgcttcatttatttgttagtagattttgagcaatgtacagcttcatcacttagatgtttcaattgtcgaaactcaattgtcttttccatcatgtcggaggaataaagtagcttggattttgatgcatatactctgtagtaattcaatctattgtcacttgtttcttgtgaattcaaacatatatttattcttattctgaccaatttttacatagctctaatcacttgactaacgatgatggtttggaagaacaaatcaaatcactgcataatcttataacaagaaacaatgaatgttctctagcctgaagtttatgtaatatgccaatagattcacaagattgttctctagcctataccatgttatcttcctctgcgcaatcaaccacgacatatgcgatgatgttatcgacaagttcttgaagatccaacaccatcttcagtatcgatcttccaccagtcaacaccatcaccaatctccacaggttccacctctgttccattctcaatctcatcatcataatcaaactcgtaatcccaaacaccgcaagaaccacctctctctttctccaaagcaggatcataagtccactccaacttcttcaacacatctctatccttccacttccccacaactttctcaacttccttcttcgccttccccatcgtcacttccttccacgaatacgcaacatccgctactcgcttcagcgcaccttcgttcgaatctccaatcacaaccgtcctcaaacacctctccttagcttcccacaaaatccccgcaaaatcagaatcatcagacactaaaacaacacactccacttctctcttatccatcacttcaaccaaatgttccttcaacgccttatcagcagcatctggcttatcactaaccatcttcacccaaaaaccagctcgtttcagctcatcagctaaaccgtaaccttcttcggagtcaaaacattcctcgccgctcttttatacttctcaatcttcatcgaatacttagccacaagtctcactcttcgatgtcctttcgaagattcaatctgtctcatacgtttctgattctctgtctcatgaatctg

SEQ ID NO: 51187 - DNA, 373 bp, Arabidopsis thaliana
cgtaatgaacaatcaactagaattatccctaactgggagaagtttaatactttcttgtgtactaccaatttttttttcctttttttttttgaaattcaggaggttctgggtcgaagctcgtaatctccccaggcccgaaaccacatcatgtattattagtttcgtcccaagcatcactcgaaccggcgacctctaagcttcgcctagggtctttaccaattgagttaacaacacttggtcgtgtaccaccaattactctcttgttcccttaagaaccgtatcaaaacaatggaacgctctcttcaacgacaagacgttcatcaacaaccacaagacaacgtatcgattcatcttaacaaccaaattcaagatt

SEQ ID NO: 51188 - DNA, 521 bp, Arabidopsis thaliana columbia
cacaataatttaaatcattaacaatcatagattcttttgttttaattgaataacacaaaacttataatgactttataaaagtatgtatctaataacccaaaatttatgaagactttagattactttttataaatcttaaatgaataacacaaaactttaacatacttttaaaaaaatcttgattgaataacaatagattttacatgacaatttatatcactaaaactcttctgaaatcataaacgaataacacccccttaaagtgttactatatcaaaatcatatgtgtattattattggatagaactatactatgtatttgaacattgaattgatattgttgtttttataatctacaaggccacaaaatcctccaatatgaaaaccacctctcacagactgggtaaaatgcaatgtgaatgggggcatatctaaggaaaggattctgatctgagtgaattgagaaaaagtcttccaaatctatgttccactatattaaaatacaagaagaattttgaaca

SEQ ID NO: 51189 - DNA, 672 bp, Arabidopsis thaliana
taacatcgtcgtactgaagtacagtcttatctccagagtttggtgtccaatgagcagcgaccctgaatgttaaaaagtcattagagaaacatgactaaagaagaagaacaaacaattgttgatcgaaagaaatagttaaaggcagatctcataaccaaccaattcaaagagcatcctgtagggaatgcaataccagcttgaagaccattctctgatatcaacttacgaacagtattctctagggtctcacatatatcagtcatcaacattccaggcttcactatgcttctgacatatttacgaacctgaaaaggattgggcaaaacgttctttcaagcggctgcagaaaagagccataaaaaaactctaatcaagaagcaaacctggcgatgaacttctgcagctcggcgaacagagttatatattggcttttcaaaacgctccagctctctcttctcttcagatgttgttctccaaagattactaaaaaacagagatcaagcagacaagcaccaagatctaaacatgtcggcacaaaaagtgtgataaaggtaacaacgaagagacttgacacaaaaaaaaaggaccgagaatccaatagattcatgagttgagaagataaaagtggtatggactcttccacaaagtcaactacaacatatgaaagatttc

SEQ ID NO: 51190 - DNA, 510 bp, Arabidopsis thaliana columbia
  unsure (1)..(510): unsure at all n locations
catgtattctctcttaatctaatatcccaatcacatcatgataaactcatggctaagtattagattgacataaaataaataacatatgtataactaactactcatttgcattaaaagttttcacgtgaaagaaaaaaaagaaagcaaaaattaaacagtcttttaagttaatacttttaggtttctctctttacatttgcatttagctatattggagagaatgtcgtatattaaatttcttggtatatctaacgtctcaaaagaccattactttaaaaaacatgcatgttattattaatgttactaatttatcataaagtacaaaaagaccatgataatatcatgtagaccaaaaaatgtaataataagacacattaagttaaaattactaaattaaaacaggttaagtaccaggtaagttgcaatacccaaaagtttctaaccattatcaaatactgactattaacacaaatagcataataagacaagtaaaatganaatagtatttga

SEQ ID NO: 51191 - DNA, 722 bp, Arabidopsis thaliana
  unsure (1)..(722): unsure at all n locations
atacaaatttatacttcaaaatgtaagagaaatccttaccaaccggtggctgttttgtaggtagtaataccgtccttgtaacttttgctgccagaaatgacagttttgtcggggccatcacctatgaaaactagatgtgtcatgctcctattcacctgaacatactctttatagattccttccttaatatgaaccacgaaagtcgtgttcttcttcttcgggacaaaattcaatgcctcgttaatcgtcttgtactgaccacttccgtcttgcgccaccacgatatcgggttttacctcggacataggagcgttcaatagcctacgtgctcgcgcatccatccacgaaggaaactcttgggacaacaaccgtctactattcatctccggaatctgcatttgtcctaagtaattcgacatttcggtaaccattgcaagcccgttatgcgttaactgcaccgcggttttcaacgccttctttatcgtctcaccagcattaccttgtgtcccttgaaacccatcaagacaagtttgctcatggcttatcgtcgcactaagccaaatcctcaacttaaccaaggcctcatcaactttatgaaactcgaacttccccaactcttcaaacgacttactaagctcaccgattgcgtaatccattagctccttgcattgatcgaacgcatctttgcccttggatccttttgtagncaatcatagtttgtg

SEQ ID NO: 51192 - DNA, 489 bp, Arabidopsis thaliana columbia
gcgatttttggggtttctcagagagaaaattcgtcggcgattttgagtgaaatcggagaggaaattcgttggcgattttgagtgaaatcggagagggaattcgtcagcgattttgagtgaaatcggagaggaaattcgccggcgattttgagtgaaatcggagaggaaaacgaagaagtttgtgccaaaacgaagaagtttgtgaaacgaacgtgaaacctaatcattcagagggtaagacagtcatttggcatattagaaggggtagttttaaaaatggccttcaggaaagggcacttttacaaaaggttattaaaataagggcaattttgcaaatctccctaatttttaaagcaataaaatatacagctacagtcatcacacatacagcaaaaattctacagcaaaaaatctataataaaaaatctacagttacagacgaaccaatcacacactaaattacattttctatctatcattaatagtatg

SEQ ID NO: 51193 - DNA, 546 bp, Arabidopsis thaliana columbia
aataaaataaacaatcaagctggttaccatgagtacgtcaactaaatggaaccacatgcaacacgcaatcaagaataactagaaacttaccttgattcggctgaacggtttagactcgatctaatcctaatctaaaataagccttcgatcgcctaaataatctacttggtagagcctcgacattagagctcctcgggatgaactagtcgtacctgaagaagaactagtcaacactcgctcatggactttttagagagattttggcgtttcggtgtgaatgaagaagaataaggcagaatgactatttataggggtggtaggacggtttgggaagcaccaggtggcgagataggctcaaccgagcttatttgtaactttatccaaaacctgcagacagacttgaattattatccatacacggataaacttggacgatcttatttgtatggaacggatagacatgaatgaacttatccacaagttgatccttatctgcttccatacttatccaaaatttcatacttatccacactcggttcttatttg

SEQ ID NO: 51194 - DNA, 458 bp, Arabidopsis thaliana columbia
cttactttaatgtttcattatattagtttcagatgccatctctcatgcatgcatgtgcattttttgaatatcttatttgctaaacatccaaaatctgaagaataacaatgcgtgtacatatgctcaagaaaagacaaaaaaaaaaaaaaaaaaaatccaaaatcagagagaagtttaaaccaaaacacatcatttcatatttacacttacaaaaaaagtcatttactcgaaaaacatagactttttcactcttctcaccacacaaaatactccaaagccaatcaaaactctcttaatataattacttatacaaaataactaatcatcttcttaattacaacttgcaatcgtctgaaccatcacagaggtgatcatctgagctctaacgtaccaataatctataagatttgaatttaagcttcaataatggcttctctcggggaacctaaccctaaaca

SEQ ID NO: 51195 - DNA, 523 bp, Arabidopsis thaliana columbia
tgacacttccttttcttctgaacgatctctgactgaatatccgcgaaatgatcttaaccggagctggcggttctgttatcgattcgtccttagccgaattgttgtctttcaagtccaaatcttccgatagtttcttcactaatgccacaaaatgtcgacgaaatgttggatatcttgataccggtttccgttaacccttgcatcctaataaaacacacaaagacatggaactttttgtttacaaacaaaaccaaattgttcgaaaataatcgaaactttaaagcggttttttacctgcgagcaaaggcatcgagttcggctcttttacgttcggtgagaggaggagacgcggaaatggcattcgagctctttagcctctctggatctccaaatagcatcactaatcttccgaggtactcttcttcttcctcagacaagtttgtagctttcatttgctcctttagtatcaaaaacggattcagaaaccaatcaaagaagacgtcttttgggcggctcatggtag

SEQ ID NO: 51196 - DNA, 491 bp, Arabidopsis thaliana
tacatctttctcgtctctttcccctgatgtctcatcaacatcttcctctttcacattcttaaaacaccctataaagataaaccattcacaagaactataaacaccttaaactcatcgagatgccaccacctaaatctagtaaaattaacaaggaacataccatctccatcatttagcgcccaaatatgctttgccaatgccttgttcatttgaaacatattaattgtctttacacgaaataacgaatgaagcgactcgtcgcataatatattccgcctattcgttggatcttgcaaatcgtgctctcggatatacgcccacattttcttcacaacctgttatatatgcaaatgtcatcataagcatttctccacacaaaactatcaaagggaaaacaaaattacaaagaaatgaaaaacactacctctgttcgagccaattgagaagttcctagaaacttctctagttgtggtgaaagctgacatattttg

SEQ ID NO: 51197 - DNA, 527 bp, Arabidopsis thaliana columbia
tgatttgtgcagaatttacaaggaggagctagcttagctactaccatgaagatttggggaagctgagatgttgccaggagaagtaagcacaaaccaatagttgagagatataaacataaacagcaaaagagagactcataagcatcaggtccttgacgtctcctttcttcttctctggcttcagattcttcccaatcttcccagcctctgaaatcatccttctcaatgttctctggatcactccttcattctcttctggtaatttctgcttccgacaagacatcactctcatagatctaactccgtgtctgcttgaggcttgtctgtttgtacggtggttagtgcagagtgggtggtagtagaaggtggtggagagagccgccatgagaagatgaatagaataattgaagaaagttttttgttttgggaatcaaaagtgagcaggaaaatatcagaatcttgatagcttaacgacaaaaatgatttgaaaaatgggtggatagatctcatctaacacacacacatgt

SEQ ID NO: 51198 - DNA, 488 bp, Arabidopsis thaliana columbia
cgccagtgtgctctaaagattcattcaacgatcaaagataaagaaataataataaaataaacacaaatcttctgtaaaaagcatcataaaaaaaacatcatgaattgatatatggagtgtgattgtcaagaaaaaaaaagcatcgtaataccggagacggccaaaacattgtagttggatgacgaaattgccaagattattacaagacaaaaagtcatagaggtttttgagagatccgttttatatatatttagtttatttctattgagagaaaatgatgatgtgtaattttatagttctttacaataaatattgttgataaatatgtatattttgatattggttttgtttgctattcaagaatcaagattggtatcaaatattacaatatatctacacaaatttatataaatgatttgatgatcaccttttttattctcattacagaaagtatctaacatgatgcttttatttaaaattgtcctttg

SEQ ID NO: 51199 - DNA, 799 bp, Arabidopsis thaliana columbia
ctcttcctctagttttctctcttctttctttatggtttggtaagacgaataaaaacaaaggtctctctcacatcagcagcagctcatcgtcgtcgtgacctacatgattttcaataataagtcaaaagcttatcaatttttatgtgaaaaaacagctcaggattcgaagaaagaaaatcaatcaacataatttattatattatattattgaggaatccaatacgaaccttgttgtttcagactcttatcaacaacaacagtggagaaaatgagtcttggacatttgacgacttttgctggaaaatctgtgaaagtcatgccctttgatcaccaaaagtctcttaaagccatttcctgatacatgtataaatcagcaacttcagaaacaaatcaaatcggaaacgggggaagaagaagaagaagagtaactaatcggaggagggaccggtgaagtcacggtggagggaccggtggagtcacggtggactaatcgtcggctttttggtctctctctagatttttttaaggtttaaaattaatttcagacaagcttcgaacccgagacatggaacccctacagacacgtgagtttttaataaccgttcagaccaaacaggagtaacaacaactgtttgagatagttttgttgaataaccgaattaaaccaaagtgaatacaaaaccgaaccgagatttatatttgtaaagatacgacgacgcctttgacgaaaaaggagacgaagaagatccaaacacggcgctaagctaagctccgttctcctcctcaaaactatccgaca

SEQ ID NO: 51200 - DNA, 574 bp, Arabidopsis thaliana columbia
gtccactttatcttcacagaagtgagtaagtgacaaacaatgggaagcgaccacaacttctaagagaaaatagatattttatacattctttcttacaatttttttgcagttgaatttatcatctacaaagtgtaaaattatggattgagcaatgcaatttttagaagaaacaattaatggacagagatataaagttttgtaaaaatctttaaaattaataattatctttgaggtttttacaagtttattatatgtccctttccattatttatttttttcgttattgacattgcttacatacagtccattattttaagtttctcttaattttattttatttattagatacacacttatgtgatacatattgatatcatctttaccaaaaatcttgagcttagccaccaacataaagttttgacaataactcgtcatcggattttcctcagtctatcaaaccttatcaagtctagtcgtctagaaggggaagacatgttcaaacggggaatcagatttatcgtcgttatgtgagtttattttattccatatatggttctcgctcgatacgtttgat

SEQ ID NO: 51201 - DNA, 513 bp, Arabidopsis thaliana
tttgagaagacagtagtaacgcaggcaaaagttcggaaagttcttcttcagtacctttttagtaaatggaaaacaagagagacgaagaagcaaaccgggtttagtggaatttttttacttaaaaacaatttatttcggtttggttctctcttgttggaccgtgtttgttggaaaggcccaggaagtcgaaaagcccaaaataaaattaaataaaatggctttatgatcatatgcgagtatgtgactgtattgagaaaacattacaagatctcaaccaaccataagttcagacttcagactaatctcattatcataagtgtaagtaatcttgaaaatgtgaacattgttaccttttagatccatcgagtaggcatccagaaaattgttgcctttagatcaatcgactatggatcttacttcatttgttgccttttagatattttaggtagctaaaatttgggttaagatagttggctactaatagtactgtaagtacatatatacaggtatgtt

SEQ ID NO: 51202 - DNA, 333 bp, Arabidopsis thaliana columbia
gaagagccgacatcgaaggatcaaagatgcgagtcagaaggaagatgtctccgatcctgagtgcgctgcagacccactgcacggactgtaggctggaagctgagacatcgcatggaaaccacgttaagaaccaatgatgtcaccgcagacattagcaacgaagtatctccaccacatcagaatcaccagtagttaatgcgggatccttgtccgcacccaggagacgccctataagattgcactcactgcgaagaaggtctgcaagttgagagtcactggactccatacatgagagacttaccttctccacatggtgatgcacagaattgttgt

SEQ ID NO: 51203 - DNA, 561 bp, Arabidopsis thaliana columbia
gaccccaccttcagctacagagaatgaaataagccaattatatgtttatgtaattttgtcgaatctgcaccatctctttcggatacatacaaaaataccaaaaactaaattcgggggaataaactatagtttctcatttcaaatctttttttcatgtaaactcaaagcatttgccattcatatatttcacgtatgcttggctaagcttaacgactattgtacatactaggacgtgcacaaatctctaaatggtaccatgattttagttatacttcaatactgtgaatgagggttttaaatgacaagaatatcagaagtttcacggactatatggattaatatagatttgatataaaattccttacttatcaaaattaatcatcgtgtgtctcacaaatctatattgaagctactgtagaaatgttgttagaatgcatgatggtacgtcggcaagtaagacatcacattgtatatgattgagattacttttagaatgggaaaaaataagtctgaagttactagctctcgtctaaaatgctgaaagaaatacacaatagtagt

SEQ ID NO: 51204 - DNA, 579 bp, Arabidopsis thaliana columbia
tgtagaagaagcgtcttttttttatcttttatatgattttgtcggagattcttttcttcaaaaatatttcttatgttatggatctcattgcttattatgaatttctcagttttgtttctctttaccttttctctttcaatagtttctgattccattgtcttaaaacatcaaagaagttgagtagtatcacacttcccaattttggagttacttgttcaaccatgtatttaacaaatatgtaaatcccaatttgattaacttgagagtttagtattggttttgacaacaacaaaaatgatttctaatgaactgtctacatgtaattcaaaacaaggtgtagaatgtattaaattcaaaagatttttattgaataaaggtggggtaagctttttgttttccccaataattaatcttgtatagctttgattctatgaatacgtggggtaagattggtggcaaaaaaataacacagtagctaaccattgatttgagatttgattcataaatatctatatcaaaatttcttaataaaattttagatgatctcaacgaagctatatataagataatttgattatg

SEQ ID NO: 51205 - DNA, 1084 bp, Arabidopsis thaliana
cgctgatatcaaagcaatctcccagtgctcagagctgttaagtttcacatttatcttccccattttcctattgttcatgtttatgttgacgtctatgttcgtgccccgggctggtctaaactgagtctgtaaaccatagttcaagaccagttctcgcttgaaagacagagccgtcattgtcaaaccgatttgctcatttctgaccgggtaatctctccctctgatacaagcttcaaagctcccgccgtttgctgtttgccctgaacccctcatctgacctgcattcgcagttaacttcaccctcttcccaaccaataaggtatcctcaagctttccgcccacatagtatttcccaccaaaagatgtcaaaccaactccaacatcagttgtgttgtgcttaaatgtttgaagctttgtgccgccctgaaacgagtacaccagatcttctcctgatgattgaaggtcaacagctacagagaatgtctgttctctaaagtttctagtataagctgcattagtctcagattggatagtgaagcgttgcctgtctctgctcacctgtcctgtagctgaagcgaatagattcctatctatttttgcagccgtctcaatatctattccatcaaatcccacatcgcgatcccaaccttgtgggtcatagacaggtctcacgagccactggtcacctgccgatacgcatcgatatctgtgagccggaaaatccgaatcataactttcaggaacttccatggacaggtatgactttgcttgctaatgacagtcgttcgataaccacgtgatccactccttcaaatagcaggtcatgacgttgtatacatgattcttcgcacaagagctacttcagattaaagggctttctcgtaacgagctcaacgagatactccttcttctgagaccttgacagcttctcaaaccgggatttcccaaggatacggattgtaggcaactggtcatactcatcttcctcctctaaatccaaattcagaagcttatctatctctttctctgtttcatctgcacctgatgataagcgacggcggagaaaaactgaaagaagatgagg

SEQ ID NO: 51206 - DNA, 495 bp, Arabidopsis thaliana
cgacaatcagctctttgttccatactttacaattacatataaacaaattcccctattcctctgatctactttatagccctgagactctctttctgtactctaatcatttatctagctctctcattctcttattctggatcagccaagtttctccatttctcaatcaagaaaaatcttgaaatactcaaatcttttcaagattcactttcaaagatatcttgataatagcctcaaactctggtttcaaagatgggaaacgacgagaccgtacgattcttgattcacttcttcaatggaagatggttcatggtgtttgcttcgtttctcatcatggcttgcgctggagccacctacctttttggtacttactctaaagatatcaaatctacacttggttacgatcagaccacgttgaacctcttaggtttctttaaagatcttggagcaaacgttggtgtcttgtccggtctaatagctgaggtcacacgacttggt

SEQ ID NO: 51207 - DNA, 1249 bp, Arabidopsis thaliana columbia
taccatgctggagagtaccttgaccctgtggcagttgccgagtcaaaagccaaaagaaaagccaaaaaactgaaaggctctcgaggtgtaaactccaatgcccaaaagacggatgctggatcaaactctagcaccactgagttgctaagtcataagcagatggctatagaagggtataaggcacaaagtgagatggtgattgacagtcttgataggctcattaccacttgggaagagaggaatgagtcagtagtcgttgaaggagtccacttaagcctcaactttgtggtaagtcttatctttgtttcattacatgttgttatttaatcatttaaggctactaggtcttttcaatctaactttttctttctttccttttttgcagatgggactgatgaaaaagcacccttcgattgttcccttcatggtatacatcgctaacgaggagaaacacttggaacggtttgctgtccgagccaagtacatgacattggacccagcaaagaataagtatgtaaaatatatacgtaacatcagaacaatacaggattatctatgcaaacgagctgacaaacatctcgttcctaagataaacaacacaaatgtcgacaagagcgtggctacaatccacgcgacggtctttggttgcctgcgtagacgtgaaactggagagaagctctatgatacaaccacaaacaccgtttctgttattgacgacgagcataggaaccaatgtgcagccaattcattaacttccaagggaatgtttcaggtgatccaaagacaaggctcctctaggcgatttatggctctttgcaatactgatggtacggtagcaaaaacttggcctgttgcttccgttggtaagatcaggaagcccgtcgtgaatactgagatggatgatggaacagagcatcaactacataaagctgaaccagtgaatcttcaatttggtcactttgggatcagcgcttggcctagtgatggcgcaactagccacgccgggagtgtggatgacttaagagcagatattattgaaaccggaagcaggcattactcttcttgctgcagttcgcctcggacatctgatgggccttcaaaagaggtaaatcttgcattaatcaatgtgtagacacttattttttttgcattttgtgaagattgtttccttaccacatatcctcgatgcagctgatggaggagcagtctgtgaatgggagcgatgaagatgatgaagaaggcgacgatg

SEQ ID NO: 51208 - DNA, 613 bp, Arabidopsis thaliana
caatgacttagggatgacacttgttcctctctgcaaaccccatttcactagaatctgtcccggtgtcttattcagcttcttcgctatcctatccaccgtctgatcgtgtatcagatctctcccgccttcttgagatcccaatggagaataggccttcaaagttccaattgaaacagtgaatatttttccagatacaatggatcaagaatcatattagtactcacagtaacatggatctcattcttcttgcagaattcgagtatcctatcgtttctccaaccaggatgcatttccatctgagggccaagctaacaaactcactacaaaagtttttcaatgaactttcacatgtgaaatgaagaacctatacctggcaaacggcagggatcagttcagcaaatcctagcagcttattgagcttagtgactgtaaagttacagacaccgatattcctgacgagactgtccttggaaagattctccatttctctccaaactccttccatgtcaaagtcaagaacgtcccctgcctttggtggcttactggctccttctcttagccggatagcgcagtgaatctgcagaaaattgaattgtacagagaggaagaagag

SEQ ID NO: 51209 - DNA, 611 bp, Arabidopsis thaliana columbia
acttaaaacctttcaagacctcttggtatattcaaattaggatttcttcattcatggaatcattcttccaagggttttaggatgtcccatgaaatgattttggcagaagaggatgtaaaacttttcgaataaaacgtagacagcaaaacatatgtttttttgggagtttttagataattaaatcagagaatggggctgggcatatgagtaacctattcaagttcgggtagaacccgttcgggtagaacccgttcgggtttgggattaatgggtatatgatttactacccaatagaataattctaaatatttggttctggttcgggtcgggtccatttgggtttgcgtcagtttggataaaaagtttcaggccctaaaaatacccaaaaaaattgaaacgggtattttgtatgtagatagtgggtctccaaacaaaaaaaacttttagatttgttaagttttaataaatttaattatatttgaatatattttactaaattttgacaaacataacacataatttttgaatagtttagttgttttggatatttaggtccaaaattaattgacatatttagatttataattataattttagataattagattata

SEQ ID NO: 51210 - DNA, 198 bp, Arabidopsis thaliana
tcctcgccttccaaggcggtgtgtaaacgaatctggttggggcagctgcaggtgtcgatcgacactcaggggtgtgtcgatcgacgactcatctcgtcacctgcaagaacaacaggagaaacaagctttcgaggaactctaggcttgttatcttgtgaagtaaacttcaaagaatctaaggaattattcgaaggtaaa

SEQ ID NO: 51211 - DNA, 572 bp, Arabidopsis thaliana
tatgaagtgaaaacataagcctcattaaaaaccttcctttggaaaacccagtgggacaaaaccaaaggcagggaaaaagagcactcatgaatcacttatccatcttgatgaggtccttgagcttgaaacaaaactaaagaggtagtgacttggctcaagtcatttggtcggtcccgaatgtggttaagcatcccggcaatggcttggtcgaatagcttagctctagaacgagtcattgggacggccggtgtgacaagaacatcctccactacaagcttctcctcagctacaagctcatcctcagctacaagcttagctccttcctcggctacaagctcacgttcaagctccggttcatgctccatatcattaatgctatccatgatcatatcatcccctccctcttgaaaaggatttgacctcaaatctggttcatctgcaataaaaggtaccaagtcagaaacattgaagctagaactcacattatacttaccttgcagatcgagttggtaggcattgtcgttgatcagtttgattatcttgaatggaccgtctattcttggcatgagttt

SEQ ID NO: 51212 - DNA, 484 bp, Arabidopsis thaliana columbia
ttaacgaattagcaattagaaacatagtcacaataatcgtcgcacgctcatagatcaaccccgcatcaactggcgcggcacgatcgggaataacattcccatcttgggtcgcctcaggatcggcccgcggcgagatcaatcccgcattaacaaggcgcctcgctccgccaatcgcctctccttatcctctttcttcttggcgtagacctcgcgcaaagtaagctttgtcgattgcatatctacgaaaaattgagtgcgatggtcggaagactccgagctagtagaacaagaaacgccgtgaagaagatgaagcgcacgttcaattcgctcccgagagaaatgcttcagccaatcgcacttttgagccgacaatgcgtgaaaagctgaaagaaagtcgtctggaatcggctcgaggaacttgagagtgcgttctgcaaaaggaaaactgcaattatgagacgaaactaacatcgcatcgggtact

SEQ ID NO: 51213 - DNA, 471 bp, Arabidopsis thaliana columbia
  unsure (1)..(471): unsure at all n locations
catctatctcttcctgggttttcggaaatggtatgtttgatcttatattggttaagtccctttttatttgaaggttttcttacctagtccgaagttcttccgagccggaatttagctgaccttgggtcgtgctcgggcggctcggaccgtgatattcaaaaatgcgttccagaggcgtcttggaacccgcctcgggatgatttgctaggtttatgtccgaggcgtttcgaggtcgggtcgggggaccatttcgtgataatgctccgaggcgttcttgatgtcgcctcggtatggattcttgatgtgatctccgaggtgttttgtgacccggctcggggtaactcttcgacgtcccccgaggcgtttaaacatggttggctcgtttacctgggtggaatcnaccccaacagtttgcccccagctcattgacttagccgagagacgatgagcttcatgaatggattaccgacc

SEQ ID NO: 51214 - DNA, 546 bp, Arabidopsis thaliana
tgttccgttaatactttgcaataatcatagtgctataagttgtttcaaagaacctgttagaaagtctcgtactaagcacgtagatcatcaacatagttatattcgcaaactggttgaggagaaacgaatagctattgaacatgtgggtactaaaaaccaactagctgaaatgtttgtcaaacctctgaattatagcaaatttcgtactttactaatgttcattgaaatgtttgatttgtaatctatttgtgagttgtgctgatctagaacagggacacaaagcgagaacaggtcatggaaatccaaagatgaatagaggatcagcactttgtaaagccatgtggaaaatagttgcctgtcatgccgggtcaaatccgacgtaaaagattgtcatctaataggaggtcaaagagctgagaagatcaaccaactgaatggacttgatacacacacacacaaaaaacaaaaaaatgtgtatcaagatcacttagttcgaatatcactaattgagaagtcaagtgatattgctgatatggcaaaaagaag

SEQ ID NO: 51215 - DNA, 834 bp, Arabidopsis thaliana
aaaagcacagtaagagtagtcatttgagtagccgacacatttacaaggtgaacagtaacaacagaatatggagagagttattatacagagagtattaatacatagatggaatattacaagtgggacaggctatgttcaaacatagaaggagtagcagtctaggaatcaaacacataaacaatgttcagttcaagacgaccttagaaataaactcttcgtacacatcaatagcgtactgcatacaaaacatatcaaccatctatctgaaattgagctcatatcctgtagagagtagcggtgggagtgcaactcaattaactttattgctgatggactagagtgttgagacgggagttctgaggggtgccttcaagacgagcgtaggaaaattctttttggccaaaaggagtcgtataaaaaggatcgcatgatgacttgataagaaaagtagcagctgaacaaaaggggccatgtaaccggttacattgtgattggacgtacaacggagtaatggatctaagatatcaatgtgacatgacgtgaggtatatgaccaaggcaacccaatatgtgtctccccaattcataggggtgtataaattgtatcaatatatgcatactagacagtcttttcagtgcgatcaccaactgtacccttaacgcagctttgtaaaagaggatcccaaagataagcctttggattagttgcttgtaaaaaacgagagtactcagacgttagaagctttgtaagcaagctgtccacctgccaatcttgtgtgtagctgtccacatatgctacatgaatagtaaatgttcagagcatggtaaaagtttc

SEQ ID NO: 51216 - DNA, 546 bp, Arabidopsis thaliana columbia
cgaaacaactacatgttctcacacgctctgtacagtacaaataatcgtaggatagtcgtcaattagtcgccgacatagtacgactacgtaacgacgatttttcactgtttagtcagttgtcgtattattatcgttgaccaacgactaattaacgactactgtttttagcgactatggattaatgactacagtcattagtcgcaaattagtcgtattagctttagttacgactactaaacgactgacttgtaggtcgtcaatcacctgttttcttgtagtgcgaacccgtggaagaggttttgaaaacaaaggaactcccaacattctctaacctattgccatgatcattcaaactaagtccatattcctaacaagtctaatcaaatcctaaccaacatgtacttctctgcaagcttacaaaacattctagattccatacctaagttccacaattatatccaccaagctttcatcactgggtctcatcaaacaagccaacattcaagatccttctagactcattctgtattatccatgataaattga

SEQ ID NO: 51217 - DNA, 643 bp, Arabidopsis thaliana
cttgccataggattcctaatctgtcagtccagaaaacactatcacataaaatccctacattgcaaaaccctcattacagtgaaaaagtgagtctgttaattttaattaccacaggagagcgagaaggatgagatcttccagctgcgagtccaatgctccctgttccgatagcattatagtcaaaggaaaggtcttcatcactatcttcctcgtcccctgtttgatttgacatcacagccgcaagtctctgagcagctgcttttgtctgagctttcttagcattcgaagctggcccagcatttgatcctgaacgtgtatgacgatgcattagaggagacgtcatcataggcgaagatggtgttcctggttccgtactcttattcctaacatgaataggtctcgtgtttctcatcgtcaactacaaaaattaagcacattgattttcatcatcacattcacatcaatggcagtttgattggaactaaaaattccacacattgaattaaaaaaatagttaccaaatttgtcaaaattttggaaatcacagaaaagtgaaatccagaaaaatggaaaaagaattaaatgcgtgaattaacagaaccttcaaaattagattcacagaaactcaaagaatgttcaaaag

SEQ ID NO: 51218 - DNA, 526 bp, Arabidopsis thaliana columbia
aagagatggttcccaaacctatgtcatctaacattcctaaaacagatttctctatctacaaacgctgcatcaaaccaaaatccgcaaaccgagtaagcaaaatttcaacactcatctaggcattatagaacagagtatcataatcatcccaatctggacaaaaatggcgattgatatagtcacctttagtgaattccctgttgacatcttttttcccaaaccctttgagaaggaattctctcatttggaagctttggccatggaaatcgataaacaggaggttgaggggctgcagcttgggattacggttgggatgggtggtgaccggcggcggtggagaagcgctggcagcggtgagggacggcggaggaggaggaaggtccgacgctcttcctcgccttctttttctgccctgagattctaattagttgagcctgaaatcacaacaaacggtgaaaaaatgaaggatctaaagtggttttagtgaattcagcggttttagagagacatgacatgaaaaagatga

SEQ ID NO: 51219 - DNA, 1080 bp, Arabidopsis thaliana
tgacagattaggaatcctatggcaaggcgtcaacagatggcaactccacagttagttgatgaggacaatgaggatgatgatttttcagtggatgtaacgagcagtagaccaagtattggacttcctggtggaagagcaatgagacctcagtctcctgtgatggtcagtctagttttaagttcttttgcctgccaagtgtatcttggtttcagctttcatatgttgttactcttttggtgcagactaagattgcacctccgagacgtacacaaccaacaaacgaaggaaataagaatgacggtaatgatgatgatgatgttgtttctatagattatacaattggtagaccaagtattgggcttggaagtgggagggctatgcggccacaatcttctatggtattgatcgactcttgaaacttgttgtttctaggtttttattattattttcatattttaactatttctcaaaatttcaatattttggaaagcacagaacaaaacccaaccacaagggcgtccggtgatggcagctcatcagcgagcagatgaggataacgaagatgatgagactccatatgtttatacaagcagcattccaagtgtaggacttcctggtggaagggctgcacggtcacgttctcctctggtaattagtttgttaaacacactcattttgaatcttgtacttgtatatcagctataagaatgttgagagtcatgttgctagtagtgaaatttttgatatccttactgttcttgctagttattattcgttaaacttgatatttcactttgtgtattacagactaaaaaccctccactgaggcatccacatgcagtagctcagccaccatccaatggagaaagtgatgttgattatgatgagtcgtatactagtggcatccaagcattggacttgcaggtggacgatcaatgagacctcgcactcctttggtaattttagttcgtagctattctgtctcacattgatactttctctatttgaacttagtctctataatgcccctctaatatgaatcctgaactagtacatgttttactacaatgatattttgct

SEQ ID NO: 51220 - DNA, 552 bp, Arabidopsis thaliana
tatcagtttcttcttgaatctccctggaaatggtagtgcaggcttgtagggtggaggaaaatactgcttcagcttgggatcgagtactgcgatcgagtatgggctcctctattgctatttcagttggaattttattctgaacaaaatcctccccttcttgaacttcacagtccctagtgatagaggtagaggcatgtcgagttggcagctctcgatcttggcagatagtgatggcgtgacgagtggcgtactccttagggttctggattgctttccctggaagctagcctcggttgttgttaacagatggtgtaatgaggatgccttccatatatctcatcctagtgcttagtgattcgaacttgctattaagtttgacgccttgtcggtcgactttgttgtttaatttagctagcttcttagcgatttcctttgctcatgtggcttgtccttgaatgagctgctggatcatagtcattatgtctgaattctgaggcgcatgtgcttgttgttgatgtggtgtgaaatcaggtggtgactgctgttgttgat

SEQ ID NO: 51221 - DNA, 474 bp, Arabidopsis thaliana
gaattgcctcttttcttctgatttcgtggttctggcatatgataaagaactcaaggatcctcttatccttggtagagctttcgtagctacagctggtgctaagattgatgtgaagaatggaaggatatctctcaacatatgttatgtggagatggagttttgcgtggatggttcggaatctacattgcctatcagtagcattgcaacaaacaaggacaaacctcctaaggctgctctgatttcaactccaaagccgactaaagaggctgttacagctcagctcacaaatgagagatgcaaagaagcagtgtcgatcgacaccacacttcttgtcgattgacaccatcgcctttcacattcagatgttttggcacctcatccacagtccacaactgcttcaattcccagtgataggtaccctctatctcttctcttactattccttcgattatttctttagaatctttgaagtgt

SEQ ID NO: 51222 - DNA, 1025 bp, Arabidopsis thaliana
ccgtgataacataattcgcttgttctgtttgtggttgttgagaaacatgaacagcattgacgttgatatgacgccctcgaccaacagaagcagctccgggtgtgacgcctttgcctcttccattaacaacacggctacgtggtctctcaccccaccattcaggatacccgacgactgcaaagcagttgttggaggcatgaccggagcgattacaatgtttacaaaccacagctctctcgaaagcatcaattcgatcggagatgggacgtgacttggtttgaaccgcatgagccacaacttgagaggaatcttcatagtgatgcaccgtagttttgagatcttcctcttgacgaacaacattgtaaacctcctccagagactggataggcacacgggaaaccagagaagatcgaacagttcgaaaactgtagtcaagaccagacagaaactcatgaactttgtcactttcacggtcctgttcttggagaaatccaagatcgcagtcacactttccacatttgcagacacgcacgggacgataatgagccatgttgtcccaaatctggttcagttttcagtagtacgcctcaatggcgagaccacgttgcttgcaacacgccaactccgccttcagttgctgaatacgcggaccattcgtcacagaaaatctcttcttcaagttgtcccacaaatctttggcaacatcacgatgggaaatactcgaacggagagatgaatcgatggacatcttgatccaggacacaagtaaggcctgaatcgtccaccaatcgtcaagatctgcagacccttctgctggcctagcaatcgagccatcaagaaaaccaaatttcttgcgagagcagagagctgttttcatgccgcaagaccattcatcgtagttggatcccttgaataagggatgagagatcacggcacctggattgtcggctgcggtaaggtcgtaaggtgagatggtgcgtcgtgtctccatcgggttaggggtcgtggtcgtttcggtcgcatca

SEQ ID NO: 51223 - DNA, 565 bp, Arabidopsis thaliana columbia
attacctcagggacaaggtgaatgctcttaagaagcattaacaacctcagtaaaaaaaacaatctactcgtgtcttaaacaattttccaatgttttagttgcactctctcaaaaggagacgatttgcctcaaatttcacgtattgaatttgtgcaatggtgaatcttcttcaattctcttctctcccttgttggaaaaagcacatgggctaaagacatgttatagttttatatatggagacaagtaatccacgacgtgtcttgtataataaacagcgtgacgttcttttttttagctccataacacaacgctgtctttgagtaaatgtatctgtcctctcgaattctgcaatttcctgaaactgggcaaattgaaattcccaatcctaaaccctaagctcaaatttgagaaattaggtttgttttcatcctttctttgtctcagtcacttagtttttgggttttagtagactcctttgtattttttaacccaaaaattgcaatgtcaaaagtttcagtcttttgcaacttctgctgtgttcttttgtgatttgagacagaagaga

SEQ ID NO: 51224 - DNA, 493 bp, Arabidopsis thaliana
  unsure (1)..(493): unsure at all n locations
nnnnnnnnnnnnnnnnnnnnnnctaaagcgtccagcganacctttgccataagcggtgtctttatccagtttggtatgcgaatgagtaacatcaaacgcgaccgcgccgaaggtagacaaatcgcgaccgacgcccagcgccgcagactgatagttttcatcacccagcgcaccgccatataacgaccagccgttagcgatgccccaggaggcttcagcaccagagaaaaatcccccctcgacatggtggccccactcttgcggacgtcccatcatgatcttatagcgaacctggcctgggcgagtgaggtatggcatcgaggcggtgctgatgtcatattcctgcacctggccgttctgttcttcaatgcgaatatgcaacgtaccggagacggaatcaccaagatcctggaatacgaaacggtccagccggaacctgcgtttcgtaaatcacacgcccgatctggctgacgggtcactttgctgtggtgtg

SEQ ID NO: 51225 - DNA, 965 bp, Arabidopsis thaliana
gtacagaagatgtctcttcaagtacgaagccactgatccggcaagtgcagaaacttcccaagagaattaagaaactacttgagatgatccctcaccaggaggtatgaacaattgttcttgtttttttttttcttttacgaagtgcaaattgtatggaatgtactttgcaggctgaaactttctgcaattaataggtcaatgaggaagaagcttccctctttgactttttgtggttactgctagcaagcgtcatatttgtgcctctatttcagaaaattcctggaggtaagtagtatttttttttcttcttttgttaattctatccattgcattactatttgtttcccctttccctcaaactcctacaatttctatgttctcatcagtcaaaaacattttcagttctggtctcgcaatcatgttgcatagagatttatgtgccatcttgatggcttcatctgctgcaatgtataggcagccctgttcttgggtatttggcagctggaattctgattggtccgtatggtctttcgataatccgtaatgtgcacggaaccagggccatcgcagaatttggagtagttttcttgcttttcaacatcggccttgaggtattatttgatatatgtgtatgctacctttttgcttttgaactgtgtttggtagaagagccaatattttgtttatttctttgacagctatctgttgaaagactgagttccatgaagaaatatgtttttggattaggctcagctcaggtgatttaaagatccgtgtatctcattccacatcatttatcaactacaatgcctacatgcttgatgtttctttttccatctactttaatctctacttctattgctgtaatctaggttctggtgacggcagcagtagttggattgcttgcccattatgttgctggtcaggctggtccagcagcaatagtgattggaaatggcctggct

SEQ ID NO: 51226 - DNA, 418 bp, Arabidopsis thaliana columbia
cataaagtgatcttctttatcttaagagaaccgagaacttgacaatattttgttcatatgatgtcattccacatattgttatgtatgtagctgccttgttcgatccatttcaacttatttgattgcatccactaactatcttattatcttatgtcaatttcaacttttctaatatttgtccacttgtccatttattttcattactctatcactcttttatggacttatgaaaagtaattttcaggaagaaaataattttgaagaaagaaggatagagataaatgtagatacatggtacaaaacaagaagaaacataaaacgttgcatataacagtataacaagcaagaacattccagataagtctaagactgtatctacatgttaattccttttttcgacactgtatttggacttttg

SEQ ID NO: 51227 - DNA, 507 bp, Arabidopsis thaliana columbia
ctcaatctaaattcaatctaactctaccaaaaattgaaaataaaccaacatactagaccaagttagactagaatcgataaagaaagatagaaaaaacccatagagaacgtaattattcaaattggagaagaagtagatacgaatttgaccaaattatgcaaataacaaagttgtatgtagttatatcaaatttaagaaaaaataagacaacaataagagaagaataaaaaatgttaattaaattatttaaagctttgacccgattacaaaaaattcagaatattttttatccattttatttggttaggttggtaataaagtcaaattttaagaccatcctcaacgcaggtcttttagggggttcttagtttttttttgtgattaaaattaaatggcaaattgggataaaatttaagaggccctcttatataagaggcacaaacaatactaagaggtggtgacgtggcaatcatgtgggtgatttgttgaaaaaaagggaggaaaaag

SEQ ID NO: 51228 - DNA, 601 bp, Arabidopsis thaliana
ctagtaacccccgccagtgtgctctaaagttttgctcgtcggtacagagtccggactttcgatcttgtcgagatagatagccgaaatgctctccatcgccccaagatgacaaaccagtccacttttcagcgacaactcctgcattggccgcttagtcacctcaaatatattttgacggtgtaacgcctgacaacccaattcgtagttttttattcccagtgaatagtagccgtttttgtttttaattaagaaaccacaatccaccattacattcaataaattaagcaggctgcttttggggtactggaatttatttaataactccatataacttgccataccaacccatgcaatgtgggttaatattttttcagcacggactaatgaattacacctttgcgaaccataatggctcctccttgctcatggaataaatggtatcggcattacatagtggaaaatatgctttgttcagcatgctgaaccgtaatgatgtgattaaatgtgatcttgtcacactttgaataatgaatccagacagcacatttagtgaatgagaataaaagtagatggcgtgttgttcgacatcgtagtgtgtgga

SEQ ID NO: 51229 - DNA, 437 bp, Arabidopsis thaliana
tacgctcatcatttcccggccggagctccaactactcattgctaaaacattctctttcgtcgaactaatggattctgattcggatcctgaggctgacgcggaacgtgagtcggagcggctaatttccttatgccctcagtttgaagtagaacttgtgcaaggaaaatttcgtgtggcgggaaaattcgagtggaggaggagagaaaaggggaagtgtaaccccggaaaccggaaggtattaaggttaagaaaaggagcagagattactcatttcttttgccggaattgcattggagaggaacatgacgtatgtgacaaggcaccacttgaggtcaaacatcctcttcatccaagacactctcttcaacttgttttgtggtgggtgccaacttccaaaaaagaaaatgctattgttgtgatgaagactcttatggata

SEQ ID NO: 51230 - DNA, 484 bp, Arabidopsis thaliana
  unsure (1)..(484): unsure at all n locations
ttttagtttctctctggacaacattgttttttctgcttgttaatgatctgttagtgattcttttatggttttctattggattctgaatacatgggatatgttattatcaggttagacgcaatctaggccaagcacagagcattctggaggctctcattaaggtgttctatatgacagttttagtgtttatcttaacaagcggattgcattctccaaagttgctaatttgatgttacccattccgtagagagaagagaagaagagggatgtcatggacagtgaggttagccttcagagaatccaactccaatacagggtacttacttctacttcctctaaaactctctgttttccgttttccgggtctaaaattgtttttttttttgcagcatgaaacagagctcttggaagatagcttggctatgcatggatttcacccactacaacatcatacaaatttggctcaagcgatgatngactgatg

SEQ ID NO: 51231 - DNA, 630 bp, Arabidopsis thaliana columbia
catccaaaaccgcaaaccttgatcaaaacatcttttttgaatcgcagcaacatttctctcttttcaattcttatataaagtttgcaatgaactcagggatatctagaggagataacagctccacagtcagctcaacatgaagtcctcggtgattcaatagcttggggtggttgcaccattatttactttgctcggccagcaacttcactttgagttgtttgatttctcgtaccaagtactcaatgtctctgaggttgaaactgtctctgcttcacatacccataggaatccacaaatccatcaggtagattttcactacatatctttttcatgtacatatctttttttaaatcctctcattctccatttgaatatcttttttctttatgtgtacgaaagggatgggaaggtttgttggaagggatgaagaaagctcggaggctgaacaaccatgtcttctccatgcttaaagctcgttgtcctctagaagacaaaacggcatgtgccatcaaacagagctgcgcaccctgccacgtgtcaggtttgagaataccgtgtctgctttcgagactctacctcagaaaggcaccgttggctgatacaatttgtacaataacgagaatgtgtttt

SEQ ID NO: 51232 - DNA, 534 bp, Arabidopsis thaliana columbia
ccgactactggatcaatgagattggagttgatggactcttcactgatttcacaggcagcctccataactttcaagaatggacatctccattacctgatacctccaagtctccacgacagcttcttagtcaaattgcctcattggtcctcccttatgcaaaggcttgaagttccacataaacacctatcagtaatcctattgtttgcaattaattgtattgaataaagttacaatgattattctgaagaagaacacagttgttaagaagcagaggagtcttaaagatcaaacaaaagataaaagacacaacttaattaaatcgtaattgtttacttcacaagattaaatacaaaggttaaaaagactttgtaaatcttggaacacacttctacaataccaagaagcaggaaacaatttctctatcatactgaaagatggtaaaacaaatcaaactcaatccccctcaaaagatgtttccattagacacaagaggttgtacagcaagggaagcaagagagccatttggggttgcga

SEQ ID NO: 51233 - DNA, 946 bp, Arabidopsis thaliana
caaactgccaaagttacacatgtcacctacatcgtcgcaagtagaatctggactgaagcaaaggaaacagacaataaaccatcaaaatctttcataaacccacaaaataatcttagaaattttggtttcagccagatattcagaacttacgtgctctgtggtgttatgttatctggtaactggtagttgtgagatgcgtaaggattggttcttggaaaataacaaaaataattttatcaagatggcttcaggaaaaagttatatgatatgcataagacggttaacatccacccaccaggacagaaccaagatcagtagaagcagactccttgtgtttccccataacaaaaggatgctgcgaataaaacaaaatcaggaattttactcaaacctttccaatttaatattgcgggcatcactcaaactatttatacttcacctttagtagctcagatgcggttggccgcagatttggtaccctgtcaagacggatccaatgattcagcaattcccaaagacaagacacaatagtagtgaaggaagttaccaataaaaagtcccaaattaatgttgctgaagcaaagtagcttactcctgcagacacttgagcagaaaatcttttgcatcagaggagagagtatcaggtattggaggatgtgattttgttgttcctatgaagaagatagcagcaacctgaaaagaaagtatgtccacttgtaattaagaagcaaaattattcacgaaaaaatatcaccagaaatacgaacaaattacctctttatactgctgactccaaggagccttcccagtcaccatttcaataactgtacagccgacgctccatatgtcagcagagctgagaacaatagccacaggtttgtgagaaacaaaaatatgggacataagtcccaggactacaattaatagcacaattgtatgagtacag

SEQ ID NO: 51234 - DNA, 549 bp, Arabidopsis thaliana columbia
aattaacatttaaatcctacaaataaataatctaatccatgtttcagctaatataaatccagaaagacatattcctatattttaaatgtgaagatttattcggtcggtcgatacgtgtacacaataaacacagtagggataagaaaatggcttacgtaatctaataagataggtttcacaagtgattaattaatgtcggaaggcaaagcgtgagtggatcactacctgaatttggttgcttaatactatagtggcaaagaatataaaatgattttgaattaactcaacagaatgaaaccaatagcataaaagaatgtttttttttaccaaccattaattaatagagctaggatcacaaatctttagtatacaatgactaatagagataatgaatatgtggaactgttataaagtgaggaaagtggagacattgggtcatgcatcaaaatatcaaattgttccatacacactctaatttgtagtgcagttagaatttcttgctacaagacttatccaatgaatctgcacgaagactcattgattttatgg

SEQ ID NO: 51235 - DNA, 854 bp, Arabidopsis thaliana columbia
aaatttgacttcttcgaggagaaatacggaggcaagatacctgaggatgtaaccggagatatacaatgttgttccagtggccgtggcaaagtcgtcatcggctctaacgacggatccgtcagcttcctcgatcgcggtgtaaagttcgattccggtttccaagctcactcttcctccgtcctcttccttcaacacctcaaggtatattgatccaatccattcatcaaattttacaattcttctgcaaattgagattgtgtttgttgtttatcaattcatgctcatcgatttcacaattcctgttgattttgatgtttttacgcttgtcgttgtttctttcaatagcaaaggaactttctcgtcaccgtcggagaagatgaacaaatatcgccgcaacagtcagggatgtgtcttaaggtttttgatcttgacaaagttcaggaggaaggtactagttcctcggctcctgaatgcattggtattcttagaattttcaccaatcagtttcctgaagctaaggtaataatctcttccctgttataatacttgacgtatatactgaggtttgatgatggaatatcatgtgtaattgcagattacttcttttctagtcttggaggaagttcgcaccaatattgcttatagccattggcttagataatggctgcatttattgtgtcaaaggagacattgcacgagagcgtatcactcggtttaagcttcaagtggatggacggtccgctattacaggcttggggttcaggatggatggccaagcgcttctgttgtttgcagtcactccagagtcagtaacttgtttagtatgcaggcgcacgaccgaaattgcagacttt

SEQ ID NO: 51236 - DNA, 538 bp, Arabidopsis thaliana
gccagtgtgctgtaaaggtttaccatcaagcatttctcgagacattaacaccgcaaattcatcgccttttttcagtttgcggaaatccatttgccactgcatggctttaatcactgcgctcacttcggcgctggttaaaccggcgtttctggcgctggcaacaaagcttcccccgacggtacctttcagcagattgttaacccactctccttgctgcatttcgctggtcattttaaaaccgttagcggcagtacggtcataggttcgggtttcacgacgagacacttcccaggtgaggcgctgcagttcgccgtccgcggttaatgtccaggagagttgttgaccgattttcaggttacgcaattctttgtcggccgcagccagttgggtgatatccccatatcaataccatactgattgagaatgctgcttagcgtatcgccagtggaaacaacatattcatgcacgcccgcttcaccggcgattttgtcatccagttcgtcctggggaatggcttcatcttcttgtgcagcttgat

SEQ ID NO: 51237 - DNA, 673 bp, Arabidopsis thaliana
caccattggttttgttaattcggtctctgatacgtctctctttgttcttcaacggggaaaatcaattgtctacatgcttgtctatgttgatgacattctgatcaccggcaatgacccgaccttacttcacaacactcttgataacctatctcaacgtttttcagtcaaggatcatgaggaacttcactactttctgggaatcgaagcaaaacgggtgccaactggtttacatctaagtcaacgtcgctacattcttgatctgctggctcgtacgaatatgatcacggcaaaaccggtgacaaccccaatggctccctcaccaaaattgtcgctctattcgggtaccaaactaacagatcctacggagtacagaggcattgttggcagcctccaatatcttgcatttacccgtcctgacatatcttatgcggtcaaccgattgtcacagtttatgcatatgcctacagaagaacatttgcaagccttgaagcgtattcttcgatatttggctggtactccaaatcatggtatctttctcaagaaaggtaatactctatccttgcacgcatattctgatgctgactgggcaggagacaaagatgattatgtttcaacaaatggctacattgtttatcttggtcaccatccaatctcttggtcatctaaaaagcaa

SEQ ID NO: 51238 - DNA, 922 bp, Arabidopsis thaliana
ctttagatgacgattgctccagaaagcggtgagttttgaaaaaatataaactttttgtgatttggtggtagttggttgtgtttttaattgaatctgtgatggttgttgatagggcaaggactggatcgtgtagcagaggaggaggaactaaagcgtgtcgtgaaaggttgaggagggagaagctaaatgagaggtatgtttagagcttagtctatgtttttgttttgtgaagtgagttgtctcaaggggaaaaaaattgttgttgttctgttaggtttatggatttgagctcggttttggagcctgggaggactcctaagactgataaaccggctatactcgatgatgcaatccgtatattgaatcaacttagagatgaagctcttaagcttgaagaaactaaccagaagcttttagaggagatcaagagtctcaaggttggttgttcattcactttcacctaaaccaagaatcttgttcaatgggatgtgaacagatttctaagtttgtatgtttctttataggcggagaagaacgagctgagggaggaaaagctggtgttgaaggcggataaagagaagacagaacaacagttaaagtctatgacggctccatcttcagggttcatacctcatattccagctgcatttaaccacaacaaaatggctgtttatccaagttacggttacatgccaatgtggcattatatgcctcaatccgttcgtgacacatctcgtgatcaagaactcaggcctcctgctgcttaaactctcaattgtttttttttggtacccatagggaactcatagagatttctgaatcacttggtttaggattcttccgtttggcaagtgtaaaagctttactcttgatcttgggttgtatttttcttataaaataaatatactccagaaacttgtga

SEQ ID NO: 51239 - DNA, 755 bp, Arabidopsis thaliana
tcccagcaaatagcagcaccgattttgccaataggagtgtcgtaaacggggatggttgatccgtccccttgaccccatatgcaacgttccaaagatgtgggcatgactttacggtgcttacctaaaaactgaccttgtggactgaagaaaagagctgtgcaatagagtgtataaccatccttctctatagcccccattaccaagtgcacattatttttcccggccaactcagccaatctttccacttcagggcctgtagattcattacatcatttacaagagtaccaaacatatgcaagaaataatcattttgtgatccaagctttgagagtgctcacttaaactagagctataacactcatagtgacaaaaacagagaactctacatgaagcagaaacatgtttttcctaagagttaagtttactttgttccaaataaaatttaactgtccttaagactccaacaacagcagctaacatgcataaccaaataaaaaccataatccggatttccgaacccttatgggtagcaacgaatccggatacgttaaaatcaaacaaaacaagacaagcagaaaacaaacaagatgtggacagagaaaaaaattaaaaacacttttgtaatttttgtaagaaactctttatatgttgtattgacagaaaaatatatataataataataatcccacagtatcatatgttgccaaaagtaaaaagacaatgaagtgtaatactatatacaattcaacatatgg

SEQ ID NO: 51240 - DNA, 969 bp, Arabidopsis thaliana
tcatgtctttgcgtcgaccaatcgtaaacaagtagtcaggatgatcagggaatgtttacgctggcagaattgcaagccgacaagacgaaacatccaccttcgatcgcaatgtgaagcatcgacgattgccattctttcgaaccatcagcagtaggtgcacaataaagctcaatgcctaaacaccaaaaacgaaaaataaaaaaaaaactttgtaagatttttttgtaaaagcctagatgtttcaaacggcattgcattaaaagctgacctttggcgtacaatgcagttctgtagaggggcatcctattctcccagcaaatagcagcaccgagttttccaatgggagtgtcgtaaacggggatggttgatccgtccccttggccccaaatgcaacgttccaaacttgtgggcatgagtttacggtgcttgcccaagaactgaccctgtggactaaagaaaagaactgtgcaatagagggtatacccttccttctctatggctcccattaccaagtacacatggtttttcctagccacgtcagccaatcttgctacttcagggcctgaagattcatcacaaaaaaccaaaaagagtcattttgtgttccaagatattgagagtgctcaactaaatttaaactagagcaagaacactcattaattagatgcttgttccaattaaatttcatctaaacgtgacaaaaaaaaagagaactcgaaatcaaacatattttccctcaaagttaagtttactttgttccaaataaaattcaattgtccaaaacttatacacatcaccaagactccaaccatagccaactaaaaatcataatccagcaaccagataaaggagaaataaaaaaatctttaattaaagagatttaatattatattttttggtgtaaaattataaaatttaatgtaacatatagtaatttatacatttaaaagataaagatcaggataaata

SEQ ID NO: 51241 - DNA, 836 bp, Arabidopsis thaliana columbia
gtcaatgatctcaaggaatataaccttagaatcaagaaccgttccttcttcgaccagtttctgcaaagctctgcacccaatctgatctctggccattaagttcacagatccgtaaatctcaaccatggagacgagatccagaggcaaaccaccattgatcttaggctcatctggataagaagctccagaaccttccatggcggctaggatttgagaaaccctaattccttcaaacatcaacgaacccttgaaagcatcgttgcctctgagaaacggagaacgctttatgggttcattgatgtggtctaagaggaagtctttgtgatctttaaaagccatcatctcttcaaatccgttggggttaaaggaatcttgtaggccaagcaatcctggagaaggagaaactccatgaaagttgttgttttgaacacgaacagaggagaagttacgaaacccatcatgaatctgagaagctccagtgagattctggtcaaacccaaaagactcatgaagagttttagccccaaaatcacccgggtcgacccggaatggttcttcgggtttggtccaaatactcatgtcacaagagatacccattttgttaagctttttacacaactccagagcttcaacactgttgttgtaatactgattcttcagaaatgggtttgtgtcgagactttgtaaaaacccacctgaaccaaaatcaggaagacgacgatgatcggaagcttgtccgaagttaaaaatctccatgcaaacctcgaaaccccattaatctctctccaaacattaggtcaaaagcagagtaaagtgtagaaaccgatttcacaaac

SEQ ID NO: 51242 - DNA, 705 bp, Arabidopsis thaliana
tacacgtaatggggtgcaagacgatagcagaaataatcgtctgttaagtaaaaaagttgctacttaacgcggagaatttgttctttctagtaagggttcttttgcttgtaattttcaggcattgctggagaataagggaccccctgttattgttggaataggtaatattgcttgtttgctgtttgtgctgttttgttttaacacggagcctaaagcttatgtttagtatatattgtcacactgtttcactgtaggtggtcctagtgggtctggtaagactagcttggctcataaaatggcaaatatagttggctgtgaagtggtttcccttgaaagttacttcaagtctgaacaagtcaaagatttcaagcatgacgactttagttcccttgatttgcctttgctctcaaaggtaatgctttggtttgcgaacgtaaacggataaggtaacttgtcagcctttgggttacttttattggaattagaatctctctctacttcatttgcagaacatttccgacattacaaacagtcgaagaaccaaactacctatatttgatttggagactggcaccagatgtggcttcaaggaactagaagttcctgaagagtgtggtgtggttagtgatcatagtcttcacatatcatatggtgattgtctttgttgtttctcagcgtggatgatttttatacacatcgttttta

SEQ ID NO: 51243 - DNA, 849 bp, Arabidopsis thaliana
taaagttcattgtttagcagtttcaaggaatgttcatccaattttttatattagagaagaatatttgaggaaagtccgaatgaaattttcaaggacaataagaaaaaggtttgtttagcaattcattgaaagtcaaatactcaacttaagttgtataacttcttagtataaacaacaaaatggtttgaatatgtaatggtcaagagtttttgaagctataaaatggatagcaattaacagataagtaacttcaaactctaaaaactcatcaacgatgattaccttcaaatctatagctctaacgataatcttcctatcatattttgtttcttgtgtctcaagtcaacgagagaccaagtttcttaaccatggcttcctcggggctaatctcctcaacttcggctcctccaaggtctacccaagtggcctcttggagttgacaaacacttcgatgaggcagataggtcaagcttttcatggctttcccatccccttgtcaaaccctaactcaacaaattcggtttctttttccacaagcttcatcttcgccatcactcaaggaaccggcgcaccaggccatggcctagctttcgtcatttcaccctcgatggacttcagtggtgcttttcaccagcaattatctgggcctcttcaacacctccaacaatggaaactccttgaatcgaattcttgcaattgaatttgacaccgtgcaagcggttgagttgaatgatattgacgataaccacgtaggcatcgacctaaatggagtgatctccattgcgtctgcaccggctgcatattttgatgaccgagagccaagaacataagcttgaggctggcgagtgg

SEQ ID NO: 51244 - DNA, 797 bp, Arabidopsis thaliana
tgtgagaaaaatataaataagattcatgtattagatataccagaaataaatatgtgaaaaatcgtataaataaagaaagcacaaggaaaatgaacaacatatgagagtggtggagagagatcgagagatgagaggtgaattaccaaacaaacaccattcttacaccttcttcgttttccttttcttcttcttaattctgttccctgatctctctatctctgtcaatactttgtcagctacagaatccctgacaatctcaagcaacaaaaccattgtgtctcctggtggtgtcttcgagcttggtttcttcagaatccttggggatagttggtaccttgggatttggtacaagaaaatctctcagagaacctatgtatgggttgccaatagagacactcctctctctaatcctattggaatcctcaaaatctccaatgctaaccttgtcatcctcgataattctgatacgcatgtttggtcaacgaatctgactggtgcggtgagatcttctgtggtggcagagcttcttgacaatggcaattttgttctaaggggctccaaaatcaatgaatcagatgagtttttgtggcagagtttcgatttcccgacagatactttattaccgcagatgaaattgggtcgggatcacaaaagagggcttaacagattcgtcacatcctggaaaagctcatttgatccgtcaagcgggagtttcatgttcaaactcgaaactctaggattacatgagttttttggttttacagctttttggaagtgtacggagcggcccttggatg

SEQ ID NO: 51245 - DNA, 549 bp, Arabidopsis thaliana columbia
tttttcgtctagtaaaatagtaaaactggagaattctctttctttttctctagtaaaccgtaatagtaaaatccgtcccaccatctaatccagtttggtaaaattaaacattttttttttgttctaataatatttttattaaaagaattataattcaaatcaatttaaaaagttttcttttgaaatggttatttaattttatagatttcatatattatatatattctaaacgtttttcgttaaatattctaaacattttagaaactttaaataactataatatttatctttaataaaatcctaagattttttctttttaaaagtaattaaaattgatggagatatattaaataaggaaatgctaataattaggaatattatttaaatgataataattaatgttaatgacattccttgtaaataagttccaacttgaggatttatttacaaaaatggttgcaaaaatatatatgtagataacatgtagataacatgtatttttatttcagttgtctttgatgtcagattgaatacccagtttgagttttt

SEQ ID NO: 51246 - DNA, 735 bp, Arabidopsis thaliana
taatacctataaatcgatagctgtatcaataatcttcctactatacttttcttgtgtctcaagtcaacaacaaaccaaatttcttaaccatggctttctggaagctaatctcctcaagtctggctcgtccaagatccacccgagtggccacttggagttgacaaacacttcgatgaggcaaataggtcaagcttttcatggctttcccataccattcttaaaccccaactcctcaaatttggtatctttccccacaagcttcgtctttgccatcactccaggacctggcgcaccaggccacggcttagcttttgtcatttcaccctcgctggactttagcggggccttaccaagcaattatctaggcctattcaatacctccaacaatggaaactccttgaattgcattcttgcagttgaattcgacactgtgcaggccgttgagttgaacgatattgatgataaccatgttggtatagacctcaacggagtgatctccattgagtctacctccgctgaatattttgatgaccgagaggcaaagaacataagtttgaggctggcgagtgggaaacaataagagtctggatcgaatacaacgcaactgagacgatgctcaatgtcacattggctcctctagatcgtccgaagccaaagttgcctcttctctctagaaaactaaatctttctgggatcatctctgaagaaaattatgttggattcctgcagcacggg

SEQ ID NO: 51247 - DNA, 434 bp, Arabidopsis thaliana columbia
agctgtgttccgacaacacgacggagagcacagcttcagcggtgtttatctgttcaggccaagaacaagatttatgttgcggtaaattactctctctctctcctcttctatatagtttccgattgtgacttgggattgtgttaagtgttttgtcttgatttggaatgtgtgtgttgtggttccattaagtaatagttactaggcattgtggcattgtgacttggctttgtgttgtgagtttttgtctgactttgtttttctatgttgtcaacgcattaagtagtagtgacttggctttgtgttgttagtttttgtctgaaaatgtttttgtatgttgtcaacgcatttactattagtgacttggcattgtggcattgtaacttggcattgtgttcagtgttttgtcatgacttggtttttgtgtgttgtggttg

SEQ ID NO: 51248 - DNA, 534 bp, Arabidopsis thaliana columbia
cgtggatgaaagcagagaagatgactggtgatatgctttcaccgtcttaggaacaaacagagctcaagaatggtttttttttttttcatttcggtctctagattctgcgaataataatgaatggagtctgtgtttggtttcatgttgaatcgatcaagatgtgtttttaactgtacatgaattatgcagaaacatctgtcctggttctcagacatcgaaactctgttcctaataaaagccgaagtccctgtttttattgtggtactagattttaatcacaatttttttttaaagttagtatatataaaaatttgcaaattgtatctatctattaaatatttttattttatagtttacaattgttattaagtaacgtcctgccaaacccgtaccgccaacccgtcccgtaaaaaaatttatttattttattaatgttgattttatttatgatatgtttatgaatcattgtttaaatattttgtaattttgtagtaattaattgctatcaaatatctctatggtttgcggcttata

SEQ ID NO: 51249 - DNA, 547 bp, Arabidopsis thaliana columbia
tttgtacggagacaaagaaaactcagaatcactttgtgtgccatttgcaaaacagttgtatcgtggcatgatcccggtgctccattccaaatatctgtaaataacatattcaaatcgcatattgccataatgtttaatgatgcattatcatgtccattccaatacattccttgtaactcaggctttacttttacacataaaaaaggatactttttgttaatttacatctctaaaattatagaatcaattagatttttataccaaaattttaaaagatattttgatgagtaaaaaatttatatgtacttacaaagtcttgttctcttcaccatacgtcagatgcaaatatcattgatgtctcaggatcaacagtgatgccaattttatgcgtaagaaacttccatctcttgtaactttttttgaattcatcaaggttgcttttgaagaaaccataagttttatttttgtcgaacgcttgattaaacttttcaaccatatactctaccgatagaagtaagatgcttaagaatataattattcatggcaa

SEQ ID NO: 51250 - DNA, 559 bp, Arabidopsis thaliana
cttaatgatccatatatgatggggaaagaagaaggagaatcatatatccatgtagaaaccatggtaggaatttaaataaaagaactggtttccatcgttgaacttcacatgacttcatatccaaagctaacaaacatgtatataaaataatacactaattaaatttatcatcacataaagacgaaagaatcatctaaaaatgatacatttatattggggtcggattccctcacaagtaagaccgaaccaaacagtcataagaataacaatcacctcatgattaaatatatgatagactccgaggctagaacaaagcatctcgggaccttattcggtcaaccgtctcaaagagttcataaattggctcgggtggtaacctttgaacacagccggagccgaccgcgagaacactacggaaaatatctatatcgctttgggggacaatcaactgagctcaatagacatctgtcaagcgtgcccgagccggtacatactgtttgcccgaaactagctctcaaacgaccaccgagccttgaagacacctgaggcaagacttgta

SEQ ID NO: 51251 - DNA, 563 bp, Arabidopsis thaliana columbia
ggatatatatatatatatctatatatacatttatgcaacacttttatgaaataaatcctagagtttgaacttaaaatttaattatttagatttaaaaattttaaaacaagatattgaggtcaacaaacattgccaatcggaaattctccatgttttctaacaaaaatatctattccgagattttttctatcaattaattactcccaataaatattttgaagatttactcagacgttatataaattaggtgtattcaccagagccatacaaaactttttttaattactctcatatttttcgttttttttgtatactcagtgtaccctactaaacgttacagaaaaaaacgtaattacaaagaatgtcactgccacgtcagaaattgctgatgtgaattaatgaactcagctctaaggcgatacaacggcagttacggctgagttaaggtatgttgcagctgagtcatgagaaaacgacggaattatgagtatactcagcctaagttacggttgatttaaaaaattgtctgagttatgcgataccaagcctacatgacagctgag

SEQ ID NO: 51252 - DNA, 529 bp, Arabidopsis thaliana columbia
ctttaattatatttctgatattgcgttcaaaaatcgaattttgttatatctaatttgatcttgcgttcaaagacgtgacaaggtcaaaagttgaaggcaggaagagccgacaggttggtcaatgatttgacattgtttcagaacttggtatataagatgaatgagttcccaaaccctaagattgattagtaaaatatcttttgaaattaaaacttatcaacaacataaaaactctaaaagtctctcatgcgctgacacatcagcttttttaagtgttctcagcatgacacctcattaaaatcaacaaccaatcagaacatttcgattaatacaccttatttacgttgaccaataaaagcttacgatttttctatgtcatctcatctacttaacaaaattaaaattagatatgggtctacccaaccaaactactttcaaaactaaaatctatataaaaacatgggcctaaaatttcttatcaagaaaacttaaggcctaggaaataaactgaaccgaatgtccaaaccga

SEQ ID NO: 51253 - DNA, 530 bp, Arabidopsis thaliana columbia
taatctaatggtgaatcgaagaaaaatccccggcaaatgcgccaaatttaatatgagtcaaattacccaaatgactactctctcaaataaagaggttgttataacacttagggatcaaattccacaaagttctcggatcacacaatagattaacagttttgaataaagctagacagaaaatattgtaaaagtaaaagacaagaaagcaattaaaattggttgtagattcagatgattaagacgtcgggtttaggaaaattctaagaaaatatcagaatagttgatctagcagtaaactaggattattaacgaaccattctagaacacaaatcactaatataaagtaaccggtggtgttccgcgaaacttactatgcttaatagtattgatcccaactctcttgtaaatccctagaactaagcaagcattataatcaggtttgataagttcactaagtaatcaaagctagcacgcatctaaatagtaggctcatctaagatagttccagtaatagatacatatggtgggca

SEQ ID NO: 51254 - DNA, 461 bp, Arabidopsis thaliana columbia
tacataattttgtcatctttgatttatgagatcttctctaacgaacatctcaaatgtagattttcatccatcgacgtttacaatttcggatattcagatcgtccatatcgttgatgtcatcatctccatctccaaaccgctgagataagtattatcgattataatctaacaaacatcaatcaatcatatacatgcattatctgttatatttttttgcatagattttcgaaacactcgtctatgcaaaaaaaaaaaaaaaaaaaaaaaaaaaaaaacccgagctcggaaatccgacctccccgttagaactcgaactacgaatggcttgatccctaactgggaaatccttcgaaaggatgcagctatcccacttaataaatttaaagtttgcattcccaatacggaattcgcttaaagatctgtaataaatcaactctgggcaccctggccaggtgttcgat

SEQ ID NO: 51255 - DNA, 482 bp, Arabidopsis thaliana
cccttggaatctcacttgtccgtatcgactatgggacaagttccccaagaatgtactactgcttttctccagaggccctttttgtgtctatgtcgcggttggaacacttttcgttgggtttgtcacgtcaaaccccgaaaatcgccttttcagtaaaacactttacgagggtgatgtctttgtgtttccacagggactcattcatttccaagtgaacgttggaaaatatccggcggttgcattcgctggtctcagcagccaaaaccctggtgtcatcactattgctgacaccgtgtttgggtctaaccacagatagacccaagttttcttgcaagtgcattccaggttgaccctaagattgtcatggatctacagaccaagttcataaaaccataatatcgtgctcgaagtgactaagactgaataattaaggatcttgtattatccgattatcataacatgtcatgacgttagcattgctt

SEQ ID NO: 51256 - DNA, 484 bp, Arabidopsis thaliana
  unsure (1)..(484): unsure at all n locations
nnnnnnnnnnnnnnnnnnnnnnctaaaggatcgtcactgacacctggcgcactgtcggcaaaggtcaggcgcaccgttttgtcgcgctgcccggcagagatttgcaggctgccgccgctgtcagtgtagcgcaggctgttttccagtaagttattgaataactgcattaaacggtcgcgatcgccaaatacggtaatactgtctggcagggaaaattgcagtttcaggccacgactggcgaatcgttcgcgaaatgcgccgcccgccacttccagcagtgggatcaaatctaccggtgctttttgataggcgagacgccttcatcagacatcgacaactgatggagatcgtcaaccagtttggtcagtgtaccgacctccgcctgtaaagacgccaccgtctccggcgtgaatttacgcacgccatcctgaatggctccagttcacgcgcagaccgctaatggcgtaccagttcgtgagaaata

SEQ ID NO: 51257 - DNA, 529 bp, Arabidopsis thaliana
cgccgcctcaatctctgcctacaaccgccgcatgttctctacagaaaacgtccccgaaaccctaatcttcgctacctactccgatggccacgacgacggtttcaaatcctctgcttactccgacaaatctcgtcaagacgccactggaaacttcatgtctgagatgagacgacgtggcaaagagacactaaccgaactaatcgaagataaccggaaacaaaacaggccttttacttgcgtggtttacacgattctcctcacttgggtcgctgagctagcgcgtgagtttcatcttccttctgctcttctttgggtccaaccagtaacagtcttctccattttttaccattacttcaatggctacgaagatgcaatctcagagatggctaataccccctctagttctattaaattaccttctctgccactgcttactgtccgtgatatccttctttcattgtctcttcaatgtctacgcgtttcttctacccgcgtttcgagaacagattgattcactgaaggaagaaat

SEQ ID NO: 51258 - DNA, 852 bp, Arabidopsis thaliana
ttattttttattttttgaacaacagaatacatgttctttatattacttaacatttatacccaaaataaagaagttcataacactaatattgattctggcttttgttttcaggcaacattgtgtcttttggggtgttcttgtcaccagtgtaagtttctaactcgaaatgctatatattaaaatagtttatataaagtatttgattaattatacatattttaggccaacgttttatgggatatacaagaagaaatcatcaaaagggtttcagtcgataccgtacatatgtgcactagcaagtgcaactcttcttctctactacggaatcatgaagacacatgcttatctgatcattagtattaacacctttggatgtttcattgaaatctcctacttgtttctctatatcctttatgcaccaagagaggccaaggttcctataattatatatttctatttatagtatggttgatatttttagtatgtacacctctagtttcaaaaatcttgattgtgatgagactctatatctacaactaattaatctggtggtacacttggcagatatccacgttgaagttgatagtgatatgcaacatcggtggacttggtctcttaattcttctagttaatcttttggttccaaaactacaccgcgtctcgaccgttggatgggtttgtgctgcctacagtctcgcagtctttgcatttcccttaagcgtcatggtgatgatccatctatcagcttttcttcaaacatctgccgttttttgtagtgaattggaaattagtatgcaatgtgtaatgttgcagaggacggttatctagacaaagcgtgtggaatacatgccg

SEQ ID NO: 51259 - DNA, 295 bp, Arabidopsis thaliana
tgttgtttttggctttacaagcgaatatgtgttttttgatgcctgccatctcatcttctgctgatatcctcaaaagattcatcttatgtaacccataaaacaacggtcccatagttaccgtcacccacccaacgatcacaataatctgaacgatctgcgcggcgagcagttttcctcccccgcccatgatcagtccgtaaggcctatcaccggagtaaatctcgttaacgtattcttgccttgcgatcagcccggtaatgattaatccccatgctccacatccaccgtggagctg

SEQ ID NO: 51260 - DNA, 489 bp, Arabidopsis thaliana
tcattttataatcatcatgcatcgatttcttcaaaaaaaacaaaaaaagtatggtaggccaaatggtcgtgtgctcgtatccactgaatccatatagatttttcgtcatcactaacgtcacaaaattgcgttgttcaatgtttagttagtggggtttgctctgtttctgtctttgtttaatattattactttcctattttcactgagatcagattttgtctgtcagtataaactctctataaaaccaaacttttgtgttattgtctttcattagtaacaacaacaccaaccaataattaaacaaatggccaacaacaattccaactctcccaccggtccacactttctattcgtaacatttccagcccaaggtcacatcaacccatctctcgagctagccaaacgcctcgccggaacaatctctggtgctcgagtcaccgttcgcgcctcaatctctgcctacaacctgcgcatgttctctacagaaaa

SEQ ID NO: 51261 - DNA, 368 bp, Arabidopsis thaliana
tgtgctctaaagacctcctcgagtgatgacgggcgtcaaataggtaacgtcgcatcagcccgagaatatcgtcatacagccctgtcccgacgtgcggatcaaaaaagacaaagggttctttcgccagttcagccagcgttacattcgggttatttgccaggggatgatcgtgcgggatcatcgccataagcggttcatggacgatgactgcgtgttcaagcgactccggtaacgctgtgttacgcagcaatcccatatccagcgttccttcaatgagcggcgcatttgctcgcgagtgttcatttcgcgggtttgtaaatggacatcaggataatcacggcgaaacagcgataacgtatcggacaccg

SEQ ID NO: 51262 - DNA, 518 bp, Arabidopsis thaliana columbia
aaacacaaagtaactttcttacaaaaattcaaatctccaattattttgtttgaatttaaatattttttaaaattccaaaaaatctcatatatataggatctgactttgtttaaatatagagaaatttaactagactataataaacagacttcataaaatttattacccaaaattagaaaaaatcaggtttcaatactgaaaatagactatgaatatatggccttatgattgtagttgttatattccatgcacacataagtaatttctatctatttgatttgttttttaaaaaaaaatatttagaagtttaaatttaaaggtcttatattttttagagatgggacacaagttaaatttatattctttagaaaatagattcttttcaacagacgtttaatccaatatctacatctggaagatttatcattacaccaaccccaataatatcagtcctttaacataagtaacttttatctatttgattttgtgtatgtgctccttaaaattaaccaagattt

SEQ ID NO: 51263 - DNA, 614 bp, Arabidopsis thaliana columbia
agtattggccgccagtgtgctctaaagtctttcgttcacctgcttacaggccccgacagctcaagggctcactcatccatttccttgagcagggacaaacgtaatcgcaggcccaggctgttctagggaccgtttaaaaatactgctgcgccagaggattcggacgagaataaatgttccagagtcgcaaacgcttgtccacaatatggaggcacatttgatgttaggttacgccaagtctatttggaagggttcatgtaataacatctgctggacctgatcaagtccagcacgctcaagtaccgcagataggaggccgcttcagatcaagcttgacggcatcagagtttgctgcctgtactgcccagaaaagactctggtatttcgaggccatcccgtcaaagtgaaagcagtggcctctctcgaaaagagttcagaaatctacctgtaccaagggttgcctgctacgcaataatcacaacctgctggcccgctgatagctcctatttagccagctaagcggtagactcagagacgtcgaagaagagaggcggaatcttaggtaacagcaaagttcttgtaacttaagaggatggcacgaagataatcattta

SEQ ID NO: 51264 - DNA, 598 bp, Arabidopsis thaliana
gatatgaagaaattgtcttggatttttaatacagtaaaaatcatttcagtcaaatccttgttttaaatttatttacaaaggggcattatcaaggctctctgaccctttcgccttattgacttggtaaaacagttgataataataatacaattacttacaagtcgtgtcttcgttggtaaaaaatatctcgcaagtgttattaatcgtccataaaataactccaacctaaactctatataaatcctcgtttctaagttctaaccaataacacacaacatagaataaaagagcttacagacaactaagaaaaaaaataaaaatgaagatgtttatctctcctcaaaccctagtactattggcattagctcttgtcctagcttttgcagttccactgaaagcccaagaccggcgacaagactacgttgatgtacacaaccatgctcgagacgacgttagtgtgcctcatataaaatggcatgcgggacgagcccgatacgcctggaactatgctcaaagaagaaagcgggactgtcgtctcattcactcaaactcacgcggacgttacggtgaaaacttggcatggagcagtggtgatatg

SEQ ID NO: 51265 - DNA, 582 bp, Arabidopsis thaliana columbia
ataaataattacattggaccttttaaatgttgaccaagtggtttcttggcttctgctagtcggattttgcacatgaatgaggaggtggtaactaaaccagagccatgtgtctgtcacgcacgagatccaaagcatcttgtgatctctttcactcttactggtcaagtggtcataggtaactaggtaagagagacttagaaaaagcgttgttgtttcctcaaatattgctctatgagtatgagtgttccatttcaacagattaattatataaacgtaataaaaaaagtcctttttctcttattacgggcttgaatcgcttgattgattggcattgcttctatgcgttgttactgtctgtgtttgcgatacgctcttacgtcttgtgtttgtaaactatgcacaattagccaatttttaataattaatcgactagtggtgaatataaaatctgcttataggtacagttgatgagctttgggtgtagtttcaaaatcttagatcgtctttgggaaaattcatattaatgatggctatacaagttggcttcgctttgattacatatcaaggaaacctttaggatgt

SEQ ID NO: 51266 - DNA, 571 bp, Arabidopsis thaliana columbia
ggaaagaattgtattttcttttcttactcacacataattttgagttttattcaaagtatgatacaacattgatatatactacttatatcagctaacacatttaaaaagtctaataattgttttggtacttacgtattttgggttttattccaaagcaacacgacagtaatattgatacaaactgcttcctatgtcttattgtaagtgttgtttaattttttttacagatatcaagaaaacaactaaattttgaaattttattcttggtccatacaattaagtagtaaggatacaattattcttgtagaagccggatttgccagaagaggaccggccatctttgctaacaaagccaaaaagatgtcgggcaaaagccaaaacttgggacggcagtttaccagaataatccggtcggcagaattcaacagttcctctctctaaaagatatgaaggagagaaaagagaggtgatcatattatttgaactattcaaatatgcattcttttgtcaaaaattttgtaatatattactgggcatacttaatgccataaaatacccaaatgacatgttt

SEQ ID NO: 51267 - DNA, 474 bp, Arabidopsis thaliana
tcgatgatgttcaactaaatcagtttagtttgttcttagcagagataagcatctagtgatactcagaacacgaactaactcaatggccatactatttttcaatagaacccaaaaatttaagttttaccttttcattttcattcccggattcaccaacccagagtttcccttcagagtccctcaaacagacagcagtgtgaccagcataggctccacttacccacttctctagggtctcaaaaccaccccaccgcccacggattttggagatagctagtaagtctccagagtgaatttcatcggtagtaatatttgtaacccaaggtttaggacgaggatagaaattagcacccatatgattcttaagaaacgctatgttagaattctcccccaaccagtattggtaaacagagggaagacatcccacagagctcggagagttcccaacatccctgcttccatgaggaatatcga

SEQ ID NO: 51268 - DNA, 603 bp, Arabidopsis thaliana
tctggtaaaaaaacgaagaacaagtgcatatctataaggcaatggtttgccttcagaattcacaaaagaaaacatgagaagcatattttacttaggtcgagaaggctatggcagcaattcttggtggattcttatacagcaatagaatctaactggcttggttacatcaaacttaaccagactagtttgagggcatataattacaattctgtgcaaaaggcttcagaggaaggaaagagtgatttgaaagatcaaggattagcatgttatttgccagctacttttacaggtggtcctagatatatgaggaacatgtatttggatgcgatggcattgtgtaaacattttgggtttccagattattttatcacattcacgtgcaatccaaagtggccagagctgattaggttttgtggtgagcgaaacttgagagctgatgatagacctgagattatatgcaagatcttaaaaatgaaacttgattctctgatgcttgatttaactaaaaaaaaacctattagggaagacaagtacatgtaagaagtttttaattcgtttcatttactcttatattatttctattattatttttgatactataat

SEQ ID NO: 51269 - DNA, 575 bp, Arabidopsis thaliana columbia
  unsure (1)..(575): unsure at all n locations
tttaaggtcattaattattaaaatgttgttaagaacttttaaattaaaaacgggaaaaggactccatctcctcgcatttaacaactcgagatctctaccactattgtacatagacattctataaatctatcggtaacagaccgcaaactcaaacttttgtagtttagggttaggactattttctggtgtaacagacatgtatgtatttagagactgtacgagtgcctcaacttagacatgttcgttttggtaatgttttgagatatataaaagaaaataatgtttacaattatgagatcacaaagtttagaagagtgattgattggattaaattttattctttgaacgtagtccaaaattgacaacaaaaagtgataattgattcgtcttaattaagataaaacaattctcttcatatgattggctactacgtaatttgttatcacgattacaagaataataatacatcattcgtagattacaaccgaatattccatgtctctgatttcctataacacgagtcaacaaagaaaaagaaaaactanaacgcgcaacaacaacaacaacaacaacaa

SEQ ID NO: 51270 - DNA, 551 bp, Arabidopsis thaliana
actttggattgcaagtaaatgtgataaaataatctggaaacccaaaatgtttacacaatgtcatcgcatcctaatacatgttcttcatatatctaggaccacttgtaaaagtagctggcaaataacatgctaatccttgttctttcaaatcatgatttccttcttctgaagccttttgcacggaattataattatttgtcctcagactactctggttaagtttgatgtaaccaagccggtttgattctattgctgtataagaatccaccaagaattgctgccatagccttctaaacctaagtaaaatatgcttctcatgtttcctttcgcgaattctgaaggcaaaccattgccttatagatatgtactcgttcttctaatttttaacagcccctgtttgatgtttctcaatgcctgttctgaatcaatcttcaccataagggaacaaaagaggatattgtagaggaagataacacgggagaattcactaattctttgtagttccctgatttctctctactactatatcctgcatggcatatttatagtga

SEQ ID NO: 51271 - DNA, 538 bp, Arabidopsis thaliana columbia
tatttttatgcacatggatttgtagacaagggattttaacaccttggagccgtaaatggtatactatacctggttagctcgtttgaagaaactcaacttgtttctttgaagtttactctttccagttttcatacctttcccttgtgtctgatcttgatacggacaaatacatattatatcaatgtaagaaacttccttgcaattatttgcaggcggcctaaacttgatggtgataattggtggcgaggtcatgcagctgccttccttaagttcataaattttcctgctcatgttcttcgacgaggccgaatttgtagggtaagtttcttcgttttcatcttctgttccaaaaccaagaatgaaaatggattcatatgaatgttgtgcctcctttatatatggttccacgaccaaagcaagccatggcagaaaaatcttgtatgccttgtttcatttgacattaaatggaaacgggttcacagtaaaataaatagattgtagtagaaaacaaactgtgatcgaagttgtttgatatgtt

SEQ ID NO: 51272 - DNA, 593 bp, Arabidopsis thaliana columbia
  unsure (1)..(593): unsure at all n locations
caaaattttccaaagtgtatatctttattcaatttttcttcatatatcaaaatatagtttcttttgtatttatttacttacgaacacaacattttataaaataagcccatgataataatgcaataattcgttaccattctcttatattacttgttcttcttctctttctgtatttggtgtatttggtcgtaaattagatagacgaatggggtcagagaaaaaaagtcatcttgatttggttataaaatgaaaaagatattgaagaaagagaccaaataaatccaagaaaataatttggaatcattaggagcaagaagtggctgatacgctttgcaaaaccaccagagagacaaagtcttttgccatctctttaccttcacgtttctccttagtttctcaccgttacaccgacgaattcggtccttaatatacgtctattgttactttggtgatgattctcatgaatatcttcatatttctaaactattcttatttgggatattagtatacntttacattggtgatgatctcatgaatgttttgatatattaaaatatatatgttcattaaacacaatttattcatctttatgt

SEQ ID NO: 51273 - DNA, 585 bp, Arabidopsis thaliana columbia
  unsure (1)..(585): unsure at all n locations
tccactaactcatctggaaggttggactgttgggtacaaagcaaaggtcccacatcgaaagtttagaaaaagagtttctattatataagccaagtccaactacaactagtatgaggcattttggaaagaaacccaataacaaatccttgcgggcttgaggatataagcctaaagaggacaatatcatactaaatggaagttggaatgggtttagaaagcccattaaatggtatcagagcctaggttgaaaaagtggacttagggcttgggctatgatcggtgtgggaaaatctctcaaacatgacacgataagaatgtgcctcaagaaggaggcccaagttcgtggtctttggtttgaaggggagattgttgggtacaatcgatcttggcatgatcttagattgccgcaagcatgtgctttgcttgcttggccatatggctggctctggatgcaatctctacaactagtatgaggccttttgggaagaacccaataacaaatccttgcgggcttgaggatataagccanagaggacaatatcatactanatgggagttggaatgggcttagaaagccattaaatg

SEQ ID NO: 51274 - DNA, 566 bp, Arabidopsis thaliana columbia
  unsure (1)..(566): unsure at all n locations
cggtggttggctcttgtctagcttctccgtcgtccctctccggcggtttaggctagcttttggccggatttcttttccggttttgttttatgttctcgttttctatagatccagtttgattttgctcctttgtgttctaactcttagagggctcaattccttgaacctcctttgtttaaagggctcaatttgtttttcaagcttatcgatttcaattatataagaacaaattagagttgtggattggggttttctctagtgcctttgagttgggttttatgcaattgagtcaattgtcatattggtttttggaaacgagtgtttttattttacttttaggtgttcatggaagttccattggcttaagttctacgctgatgtcgtttgaagatcatgatatgactacccaggggagattttcctttgcgaattcgaagatgaagaagattgatgggattctctgaatttggtgttgcccatcggacaagcttgaagtcttggtggtcctggtagttttggagttcctgcgatgactaccaaatcggcggtggcgtgnatacaaatgt

SEQ ID NO: 51275 - DNA, 899 bp, Arabidopsis thaliana columbia
tgtggtgattggccgacgaagaacgaacctagctggcgcgttgaacggcttctctacctcttcggagatgatcttcacgtctgatttcatttttttttgtcttttccgatttttatttgattttttatttagtgggatcgattttgatcaattagaaatttaagtagtgagagtggttaatttttgtaaattgggggatttaatgtgttagattaggaaatataataataatatcatcgattaatttcaaaccatcagatttctggtcgatcgtcagcaaatgttacattcacatacctatggggggtaatcaatctttctaatacgaatctctaatcaaatttgcattgataaaacctttctatttttaacaaagtcactatttttaaccatcttaactagatttgtgggattgtaacaaagtgagaataatacataccaaactccttaatttcccaaatacaaatgttttctggttggtggtgaagtgttgatactttgatcaaccataccatcttaaagttgtaaaatccagccgacaccactaggttcattctcagtttctcatgagccttatcatgaaccatcaacctactactacaagtgaaagtatgatggttaggttaattctcagtttctcaccctcttccggccgcatgtctacctcgaaccaagcctcactctccttggacgcaattttagcaatatacacaacaaagatttcttagtgtttagtctactcaaatccttgccactaatttagtctactcatattaaaggtttagtcttttgtgagtgacatccttgttaaaaaaaaaaaaatatcattggcaagggacagagaaaattggggggggggggggggcaagcaaatgaagcgcagtcgttttgatgagtag

SEQ ID NO: 51276 - DNA, 586 bp, Arabidopsis thaliana
cactgcataccactggtggctctcactcgctgatcttgaagagaaagtgaatgggctaaacaaagctcgggctattctcaccacggccaggaagaagaatcctgggggggctgagctatggttagctgctattcgcgctgaactgaggcatgacaacaagagagaagcagagcacttgatgtcaaaggctctgcaagactgtcccaagagtggtatcctctgggctgcggacattgagatggcgccacgtcctcgacggaaaacaaagagtattgatgctatgaagaagtgtgatcgcgaccctcatgtcaccatagctgttgccaagctcttttggcaagacaagaaggtggagaaagccagagcatggtttgaacgtgctgttaccgttggcccagatattggcgatttctgggcgttgttctacaaatttgaacttcaacatggctctgatgaggacaggaaggaagttgtggcgaagtgtgtagcttgtgagccgaagcatggcgagaaatggcaagcgatctccaaaagcggttgaaaatgctcaccagcgtaattgaagttatcttgaagagagttgtga

SEQ ID NO: 51277 - DNA, 420 bp, Arabidopsis thaliana columbia
gtgttttgtttggtccataattttcattcaaattaagtctcagactcagtcaaaagaggagcaaatacaatccaaataaagggaaaatataaggtaacaaggcaagaaatgcctaacaatatttcaaaagaagataaactagggataaatgcaagatacaacacaaaggaagctaagcgagattgaaacaagtcgatcccaatgacttcatgagagactgcatccagtgcaatccgcaaactattgggcttcccaagcccatttcaactcccatttactatgatattgttttctttgggtctacatgctcaaacctgcaaggatttgttattgggatccttcccaaaagatctcttactagttggagttggacttggcttatatattagaaacttattttctaaacttcagatgtgggac

SEQ ID NO: 51278 - DNA, 2082 bp, Arabidopsis thaliana
  unsure (1)..(2082): unsure at all n locations
ggaatggcgagaaattcattcgcaacagaatttcatcacttgactactcctccacccctcgtttgcgtctgttattccaacggtgactcatggtccgaccatagctgcaggaaaaccaaatacgtccactattctttgctcgtggtttttgttctgttttcttacactcttattctttacaaacctggttttttgctaggtctttttattcttttgtaaatattcttttggtttgatatataaattacacatttaaacaaaaaaatatatatatagatcaaaaatctcgtagtaatatttagaacaaagacggtaaatctttcaactttttcagaattgtaccgaccgttaaacgaattccctgatcgaaaatgggtgtagactattgggataaggttgaatatactcttgatatgttttatttcctataatttaggagtttgggtttatcacatataatgatcctcttgtataaatacacaatgttcgtgagttaataaagtaagttagttcaataccttcttctacatggtatcaaagagcaaacaaaaccttaaaactcctaaatattttcgttagttttgtttcttacgtgttaattaagaaagtcatggctggtgacgatgtactcgctacagctggacaaactgttgcgcttgttgcgcaaccttctacggcggctgtgtcgccttacaccttggctagctccgacattccatggacgatgatttcctctgttcttttgaacggagaaaactacattgaatggtctgaagagatgttgaatgctcttcaagctaaaagaaaaacaggtttcattaatggcacaatcaaaaaaccgtccagtgaagatcctaatttcgataattggaaagtggtgaattcaatgatcgtaggttggattcgggcttcgattgaacccaaagttaaatctactgtgacgtttatttccgatgcacatcttctatgggacgaactacaacaacgtttctcggtgagcaacaatgttcgggttcattacatcaaagctcaacttgcctcatgtcatcaagatggacaaacagtaatcgattactatggaagattgtgtaatttgtgggatgagttgaagaattatcaagcaagtgcggtttgtgctcatggatcgataatgtctgcaattgtcaaggaacgagataatgagaagcttcaccagttcataatgggccttgatgattcaagatttggtgggctttgtacaagtctcattaacatggatccgctgcctttccttggcgttgcttattccaaagtaatcagagaagaacagaggcttggttcttcacgggctcaagaacagcgacaagaggcaatcggttttgttactcgtcgcgagaactcttcgatagcatcttcttctacacagtctgaagtccaatatgggaatcatgttgattcttctattatcaagtctcgtcctgttcagtgttctcattgtggacgtacgggtcatgagaagaaagactgttggtccattgtaggatttccagattggtggacagatcgtaatggtggcggtcgtaactcgggtggacgcggtcgtggcggacgtggtgctggtcgaggtcgtggcggacaaacaccagtggctcacgcaacaagcgccaatccaacttctttctcggactttacatcggatcaacttcaagctctctctctaatgattcaagagaaaacatccaccggcacctctgataagttgtctgctaagacgatgctttgcaatgttatttttgacacaggggcttctcaccatatgactgggggactttctcttttgactaacatcgtccctattacaccttgttctgtgggttttgcggatggtagcaaaacttttgccttaagtatgggcagtttccgctgtcggagaaacttacattaaccaatgtgctttatgtacaacattgagttgcacattaatttcagtcttaaactcgttaaacaaacaaaatgtttggcattgtgttctgatacaatctgtgtnttataggatcctttttcgaagactttgattggaagcagtgaagagcgtgatggggg

SEQ ID NO: 51279 - DNA, 723 bp, Arabidopsis thaliana columbia
gggtatgaacccagctcacgtaccgctttaagactgatttgatttatgatatctacaaaaaaacaagtattagcgatttcattcggcggtaatgggctttctaagcccattccaacttccatttagtatgatattgttctctttgggcttacatgctcaagcccgcaagatttgttattggactccttcctaaaaggccttatactagttagagttggacttggcttatatattagaaactctttttctaaacttcaaatgtggaacctttggtttgtaccaacaatcttcccttcaaaccaaactccacgaacttgggcctcctcttcaacgaaactttggcacccttaactaggcaccttcttattcgtgaaattcttgaggcaccttcttatcgtgtcatgtttgagagattctcccacaccgatcataccccaagccataggtccactttttcaacctaggctttgataccattgaatgggctttcattccaacttccatttagtatgatattgtcctctttgggcttacatgctcaagtccgcaaggatttgttattggactccttcctaaaaggcatcatactagttggagttgtacttggcttatatattagaaactctttttcgtaaacatcagatgtgggacctttggtttgtaccacaggcgactgattaggtagtcgttcattttggcgactgaataatgacggtttagcga

SEQ ID NO: 51280 - DNA, 894 bp, Arabidopsis thaliana columbia
gttggttgctcgtaaggaagagctttcagtgttgttgctttggagttctttaactattatttctttaccttttcttgcctgggcttttacgatgtgggctggagcaaaatctatttttttctttttatacctctcaaagatcatgatcatatatactaggagaaggtgttagaaggagttagattgtttaggttttgagttatttttctaagctaataagagagttatttttataattaaaaaagaataaaaatttaatgggcttattcaaactcctatttagtatgatattgtcctctttgggcttatatgctcaagcccgtaaggatttgttattgagtttctttccaaaaggcctcatactagttgcagttggacttgacttatatattagaaactctttttctaaacttccgatgtgggacttttggtttgtacccaacaatctccccttcaaaccaaagaccacgaacttgggcctcctggctctgataccatttaatgggctatctaagaacattccaactcccatttatattgtcttctttggacttatatgctcaagcccgcaaagatttgttattgggttccttcccaaaaggcctcatattagttggagttggacttgacttatatattagaaactctttttctaaacttccgatgtgggacttttggtttgtacctaacaaagatgtattgagagaaaaaaaaaatgtattgacagagaaaatttctaatgtttttacaagttcctatggtcaacgaaaagttaacgttgtcgtatgtttaatattgactttccagtcacccaaactctcctcgacgactaattctaatctcataagtcataagcatgaactttaaatcaaaggcttgccaagcttgaggtct

SEQ ID NO: 51281 - DNA, 1302 bp, Arabidopsis thaliana columbia
atttgaatcctctaataactttcacgaatattgctacatttgttactctaacaaaaaaaaaggatacatcaaaaacaatataactaatcacttccatcggaagtcattttcatatatagtcctactaatataaaataataataagtttgaaggaaaatatgttaatcatctatttactcattagagaaaatacacattgatttagaaggacaattacaagagagagagtgtcacgaaagaaacatttgcttaaaggaataaaatacatggatgtattaagcagtgtttgttaggtataaaccaaaggttccacatcgaaaatttagaaaaagagtttctaatatataactatataagccaagaaagcccattagtgttcaccaaagcttccatctatcgtctgaaatacctaggcaattttagtctagttctagacgattttacaagatgtacataggtgattttttgatagtctaacggttttagaataaacaatatgtatatattataacttaatgaatataacataacagaaataccaaaagtttttttatttgaatgttaatttctgagtctttatcacacaaaacatcggacttctctctcttctctcacctctatttttcagagaggaagtcatcaaagtttcttcttccggcaacgacagcttttcagtgttcgttggccatcaatctatctggaatcatctagctttctcagcagggatgtccagctttccgtccggcggcgctcgtctttatggtgatgtttggccggctttttttcttacaccgtccgtttcttttaacggtggtggtcggctaccgtctggcatccgtcggcttccacaacggtggttggctggcttatgtctagagtttcatcgtccgtctacggtgtctcgtgtagattatgttttctctcttaggcttctttgtattgagtttgattggctctcttgtgtttcaattcttagatctggaattaaaattccttgaacctcctttgtttaaagggctcgttttgtttttcaagcttatcgatttcaattttttaaaaacaaattggagttgtggatgaaggtttttctagtatctttggattgagttcaacatagttgtggctatttcttctcactgatctatgaagaagattgtttttcttttatatttttagctgttgacggaagctctatcagcttaatatttacactttgttcttcagtttaagacacttcatatttcaggatcctgattaaaagtttagttgttctgcagatctgaaattaccttttcgtcgttg

SEQ ID NO: 51282 - DNA, 1136 bp, Arabidopsis thaliana columbia
tgctccacagcgggcaatatcagaaaggtccatcatctgcaagatgaagaaaacgaagaaaaaacactggaagatattatgcttcgaaatgtttatttattcaaagatcagtgaaacaggtaagaaaatgatatctatatgatctggagaatagagacccgccatggacaagtaacaaagtaatgaataagaagaagttgaagctaggaactcgctataacctagagaggttataacaagaggagaaattctcaacccatcaatggcatcagtaatactcgcaaaagtttgagcatccaaagttttattgattaagacattaaggattctaagattccagcaacaaccaatctatatatcaaaaactcagcatgatatgacctaattcaatgtataagaatggatactgcaaggcacagtagtaaactagtaaagcaacatataacgctgaaccaatacttaatctacctaaaaagagaatataatggaaacagaaaactaaccagtcgaagatcctcttgctctggacaatgccgttctagccaataggagtcaaagtgacttgttctgggggtatttgttgaagatactgacgtgatgctacctgttgatgatgaagtggcatgatggcaaaatttggcccctacatggctcttaaggtgaataggatatgtgtaagactcgtctatgaaggcagtgtccatctcgtgcagatcctcaaacattccctctaaacctttattccgccattcgtttatcttgggagaacaaccttcagatgcaactccagatttccgcagaacagagttttccaagccaccagcttgagtgaaggaatttaaacttcgtgaatcaattatctgttccagtatctcctccagtttcaaaaggcgctcatcaacatccacacaatttatttcacatttatctgcgtatgacatatgtaagagtgcggttccagatggaagagaggaacttcctcctcacatatcctgcagattacataatcagatccgcctaactcttttccaggctcatttgacatcttatcttcatactcatcgctcaaataaaatctttgttctacactttactatcaaattgaggttcatgcgatggaaattcttgtttagcag

SEQ ID NO: 51283 - DNA, 1153 bp, Arabidopsis thaliana columbia
gctttatcttataatgtacttcgatagtttgtgctttttttcttggacaactagaaaaatgaaaatttttcgtggacatgtcattctttttttcccttttattttctttgtcttatgtaatagggatggtcatttttattttatgacaattatatgtagttcaagactccaaactataaaaaagttttccctttctcttttctctaaaaattctctaaaaattttcaaagatgagagaagcgttttcttttgccgaccagagttcttctagttttgttatcccgatttagttggctttttgtccattatctccggcttccgcagtcgtgatggctggtcctatgtctagcatcattggcttctataagcggcgttggccagttttgctgttttaactcgccgtccattgtatctagtagttccgaattttgcttttgtttaaacaattttctttctcctatttcgtaaaatttggtctgattgggctctattgcgtttcaattcttagatatggaatcttaattccttgaacctcctttgtttaaagggcttgatttgtttctcaagcttatcgatttcattatttacgaacaaattggagttgcggatcaaggtctttttggtgctttgggttgagtttaaggcaattgtggctatttatctaactgatctatggaaacgagtgtttttttctagcatgttgctgaaagctccatcggcttaatctctacgatgatgttcctcgagagtttgggagtcaatttctttggaaatatctttcctttgcatattcaatgatgaagattggtggattctctaattaaaaccgtcagacttctttgtaccttggagatctgacagtttcaagtggttttggagttccaaatcggcgatgatgactggcgacgacatctgcttcacatgtccacgtgtctcaaccttgcattggattctgtaaatatcttactttccaaagaattcagtttcctggattgagttttctttaagttgggcctccacttataagctgaacttgttgtttctctagttaggtaacatggatgattctattgtttagataatccaatgttgtaaaagtttaatgtgtttgttaaaacatgtaagtggaagttccacggttgtatcttttaca

SEQ ID NO: 51284 - DNA, 410 bp, Arabidopsis thaliana columbia
tcaaatccttgatcagaaaaattcaagtcatgtaacctctcgaaccagagataatctagccagtttccatcttgattatgataatctcttgtgtcctctgctttcgagctggcgctgtaatcatcgtcactcgtagtaatcgaccgaacaaacccatccgagccgccaccactactctggtttaccagttctggagtcccgtaaagacactcaatctcgtgaccggttctcaagttcttgtccacgaatcctaaactcacatcactcgaaggacaactcgagttttggcaagtgtatacattagataacatcgcctctttttccacgaactcaccttttctcttgttacctaatggttcttgatcaacaagaaaacaagaatttggagaccattcttgatcagccttttt

SEQ ID NO: 51285 - DNA, 693 bp, Arabidopsis thaliana
tacggaatcgtaccggaaaaaggtaaaccggtaaccggttcttcagacagtttaagacgttggtggaaagaaaacgttcaattcgaccaaaccgctccaaacgctgtttctgattacttgacattagcggctgctcagttaatctcatcaaacgaatctttagatccgaattcgtatatccacatgcttcacgagctacaagacacgacgttagggtcattgttatcagctttgatgcaacattgcgtgccgccacaacgacggtttccgttggaaaaaggtttggctccgccgtggtggccgaacgggacagagttatggtggggagagcaaggagctgcggcgtttgaacacggtccacctccatatcgcaaaccgcacgatctaagaaaagcttggaaagtgagcgttttagcggctgtgattaaacacatgtcgccgaatttggagagagtgagacggctcgcgagacagtcaaagtgtttgcaagataagatgatggcgaaagagactgatacttggtctcgtgtgttgaaccaagaagaagctcgtctcaatcgcctcaagatctcagatgacgaagacgaggatcgagatctagaacaagcgagattcacatgttttgatcaagaatcgtctctaaacacttgtcttattgtagggcaagatcaagaaccgttgggatcaatgagg

SEQ ID NO: 51286 - DNA, 548 bp, Arabidopsis thaliana
tcccccaccaacaaatgcgtccctatctatcagctcctctgaaaggagaaaaagtttgattggaatgaggactgcgaacaagccttcaagcaattgaaagcatacttgtccgaaccacccatactcgcaaaacccgaagaaggagaaccgctatacctatacacggcagtatatcgaaccgcgataagcgtgtcctggtgagggaagatcactaatgataaaaaccgatctattacattagtaaaacgttgatagacgctgaaacccgttatccagcaatggaaaaacttgaactggccatagtcatgtcagctcaaaaactgagaccacattttcaatcacaccccatcgtaatgatgacgtcccaaccaatcagaaccattctacatagtccaacccaatcaggtcgacttgcgaaatgggccatagaattaagcgagtacgatataaagtatcgcaccagaaccagcttgaaagcacaggtcctagccgactttgtaatcgagatcctgttagcggacctggatggaaccactctaatagaaatg

SEQ ID NO: 51287 - DNA, 643 bp, Arabidopsis thaliana
agtgttctcgcggctgtgattaaacacatgtcgccgaatttgggaagagtgagacgtctggcgagacaatctaaaagtttgcaagataaaatgatggctaaagagactgatacttggtctcgtgtcttaaaccaagaagaagctcttctcaatatcaaagacctcaagatctcggaagatcaggacgatcaagaatcgtcggggtctaagagaaaaagtgagtctatggaaccgtctaagagtgtttacacttgccaaaactcgagttgtcctaaaagtgatgtgagttttggattcggggacaagaactcgaggacgggtcatgagatccagtgtctttatgggtcgaaccaagaaccgagccagagcggtgaatatacatcttccttgcttgaaacggttccaagtattgttactaattcgactagtgaagatgattattacaatgtgagctcgcgtgcactggacaagcgagatgatgatgatcatagcattaatgggaattggatggaatatttctggttagaaaagatgcagcaggagtttcattgctctaggagattcgaagatgatgagggtactggaacggactttgaccaactcacagaatctgatcgatcggacaacgtgaatttgaaccaac

SEQ ID NO: 51288 - DNA, 400 bp, Arabidopsis thaliana columbia
agatgaagaattctactagaataacctaacaggggggcgatctactaaaccatatgaatccctaatgagaaaccctattcctaacaagcaaactactcagacatattgaatgaaaaaagcaacataattgagtaaaaaagcataaacacatcaaataagattagagtaagaagggatgtcttcactgtattgaaaactgaatgaatctctcgagaacaagggatgaatagcttatgtctctgaaaatagggatttgcaaagaacttcataaaagaaacttaggtctaaacaactatataagaaccctataaaacatccagggactaataaagcaaatagggaagtcttctggggcaaatttccgcttctataaacatgaaggcatcatggactttgctgg

SEQ ID NO: 51289 - DNA, 559 bp, Arabidopsis thaliana columbia
aggatctcctaagattttttgtttgcttgagggcaagcaagagataagtttgggggagttgataacactgtattttactcattttaggtgtatgtttatcatcatttagttgtgcatttgctcattgtatcatatcattttgcaccattttagcttattttgcatacttaggcatctaggatcatcttgcatacgtatcgcatgttttggtgtgttttcaagtgcagaaggagctaaaaaggactctacttgatccattcactcgatccaggcagctacagaagaggcatcaattcactcgacccctttactcgatcaaggtagcctcagatgaagcagctgattgatctactcgccccgtctactcgatcctctacttgacccatttactcgatcaagggtgacaaactctacaagacttgttgagctatcaaagcgtcttcggatccgtctcattctccactcaactagacatctgagcatacggataggagaggaagaagcatctactcaaccaattgatcactcggagcatagacacaaaggcgcaaactttgaa

SEQ ID NO: 51290 - DNA, 154 bp, Arabidopsis thaliana columbia
tacgtttttctttttaagtcttatttttattcttatttttctttttgagtcgttttattgagtcaaacttttgttaggaattatgatctctattctttagattattgtctggttgatgaatgttgcaggtttgactcaatccaactattagaaa

SEQ ID NO: 51291 - DNA, 520 bp, Arabidopsis thaliana columbia
aggatcccctccacaattagggaatccataccaaatacgtagtggataataagtttttacggtcaattaatcctaaaacactatcctgtcgttgtagtattttaggtgccaatccaaatgggtgtgatgcagacagatgagatatgatcagaagttgctaagtcaagccaagcagaatttggttggttttctaacagtcctagtgttgatgcagaaaacagtaaaaaatcacagaaatgactgatatactcgatcgcaaggtcgactaccagaagggaccctgtgatcgagtacaacaggatgatagagagtgaaaatgcagaaatggaccagtttagtctatcacgcagtctcactgttagtagactagtgtgatcgagtagaatgattgaaaacagaaaaatactaaaattcaataacaagtgaatgaagcatgtaagtaaacagagaaatcaaatggatgagaaattcctaaggatggggtaatcaaatagggtggtcccctaatcaattcagttgg

SEQ ID NO: 51292 - DNA, 788 bp, Arabidopsis thaliana
gtaagatactgaagaaatcatgaacatgatccactgaacccacctagaatgaaaaccaagagcaacgagcaaggctttaacatagttccactctacccgatcaaatgccttagacatatcagatttaatggcaatgaaatccttagagattgtcttgtgtgttctcagaccatgcaccacctcatgagcaataagtatattatcagatatcagcctttccgccacaaacgctgattgattaggagaaaccaattcagggaggaaaggttgcagcctcctaatcattatcttcgaaatgatcttatacattactgaacataaacttattggtcttaggtcagtcatcttatctggtttcttctttttgggcagcaaacacaaatgagtgaaattccattccctgggaaaggaaccattgagaaagaacttttgaacctcttgagtgacttggagtccaatgattgtccagtacttctgaaagaagaaaccatctgcaacctcttgagtgacttggagtccaatgattgtccagaacttttgaacctcttgagtgacttggagtccaatgattgtccagtaaaaccatcatgccccggggcacttgagcttcttattgcgaagaccgcatctctaacttcattcttagagacagtggcggtgaggaccctgttcataacctctgttacccttggctgaaaaccggcaaacaagtcagcaaaattacttccctctgaagacttgaagagatccttgaagtaggattcagcaatagccccttttgccggcat

SEQ ID NO: 51293 - DNA, 423 bp, Arabidopsis thaliana
catgccttcgaggagatatgacgcgcccgagccaagtcggcgcaggctgagcctagagagcaggagattccgcatgtccctgcgaggcattcttcattcgagcctcatgaatctgggaggaagaggaggaccacactcactcgatctagaagtaggagcggacgacttctgtagtctcgtagtttacgtgaccgcggtgctggccgcagcagaaggagagaggtcgagtttcctcagagcggtgctggccgccacagagctgatgaggtcgagtacccacctgctggagctgattcggaacaaggaggttcttctatggcttgggagcaatcgcaggcagccattgacgagcaactacgttcattctttgactgaggtaagcgcctcacttcaccattgtattataccgtatgttgtgatttg

SEQ ID NO: 51294 - DNA, 768 bp, Arabidopsis thaliana
tcaaacttactctcattctcttctcaacttacatttacaaagaaaaatataaaaaaatgagaacgattatcgatttaggaaaacaaaaaagtcatctacaaatcattgattctccgacgaacgttgactgtactcgtgaagtcggacttcgaagaaccctccgttcactcatggagtgcgtaatcccatattgttgcacgtaccaacctcctcccaccgaccaaaacgacaccgtctctgtctcttcatccacttcttcctccgaccaaacaggcgttgtcgtcacgggtactttctatggtcaccgacgtggccacgttagcttctgcctccaagacgacactcgtccctcctctccacctcttctcctcctcgagctagccgttcccacggcggctctcgctcgagagatggaagagggttttctccgtatcgctctccggagcaaaagcaaccgacggtctagtatctttaacgttccagtttggtctatgtactgcaacggcagaaaatttggatttgcggtgaggagagaaaccactgaaaacgacgtcggatttctccggctgatgcagtctgtttccgttggcgcaggggtgattcaaatggcgagacgttgtatttgagagcaaagttcgagcgagtcacgggatcaagtgactcggaatcgtttcatatggttaccaaggaggtggttatgggcaggaacttagcatttttctttcaagatcgtgaaagtaattaagaaaaatctagttatgatggatg

SEQ ID NO: 51295 - DNA, 546 bp, Arabidopsis thaliana
ctatttctctgtccgtagcatcgaattagacagcatgtgagggatttacatcatggtggccaaggacattctcgtatgccaaaagacttgttgcaaagcatgccgactgaagtatataccggtgttcttgaagaaggttcgacttctgttacttgtgctatatgtattgatgattatcgcgttggtgaaatactcaggatcctaccttgcaaacacagtaagtcccattttgttctattcgacttggagttggttaattatctttcataagcttctttaaactagttttgttaacttttttttttactcggggcagaatatcatgcggtgtgtatcgattcttggctcggacgttgtagatccttttgtccggtttgtaaacaaaatccaagaacaggaaatgatgtaccaccagcatcagaaacaacacctttgatttctcctggtccgaactctattacttcactacaatcgttttatgatctaccaatagttgtcagagtatatctgtaagtactcattacacccaaagatatcaactagaga

SEQ ID NO: 51296 - DNA, 372 bp, Arabidopsis thaliana columbia
cagtaaccaacagaaagcttccaacgattcgtgcaaagttttcggctatgggaccttaacttgactcgaacagacggtttaaactcggaaacctctcacttccgctcaatttctcttcacaaaaaaattggagtcgaattgggctaatatagccagggaatggcgagtcaacatgtccacgtgtcatgagtatgggcgagtcaccagtccacatgtcatccacccgtgatgatacgctcgccgttctagcggatgagtgacacgtggccacccaaacttcggctccaaggaactaaaattcggctccaagcaactttgcttggagcccaacttagccgaggcacgtatcctaggcgcggtcaacggtcggtc

SEQ ID NO: 51297 - DNA, 511 bp, Arabidopsis thaliana columbia
tcaccaacgcaataatcatcgatacatatagcacaagtaaccgaagttgaactttcttcaagaacaccgctatatacttcagtcggcatgctttgcaacaagtctcttggcatacaagaaagtccttggccaccatgtggtaaatccctcacactctgtctaatttgatgcctacggacaacgaaacaagtggctagaatagcagacatggcgagtaaagatatgaatgtaatacccatgatggaccaagatgaaatcccgaatcccgggatgagccaaagcttcatctcgtcttgatccgcgtaccctttaagcacctcccctgatgctcttgtaacaagcaagccatgtatatccacaccagatgaatttcctgccactatggttttgaattttttcaagattataacaaccattgattaaagatgtttatatactcacatgaacattgagaacttactaggtactaagagctcatcatatccatcgttatagacaatcgcagctttgt

SEQ ID NO: 51298 - DNA, 534 bp, Arabidopsis thaliana columbia
tcgtcactcgtctggatgaggtcgaacaaacgattagggcattggagattcgttcggaggattgggagaaagctggtctgcagctagtgtggcccatgccagatcgccttcttcaggataatcgcactgtttctgacagggcgatctgatgttctatctggctgatagaagatgatccttggtggcttttcggactgtttttcctttgctttttatttccaaataaacgcccttgtgatggctggcgaccttgtttaactctaatttattctggaataaatgtctttgtaataacccccgatcccgtttggtcgttgattaatacaatgcaattgaattggcttatttcctctgcgacctctgaggtcggcttttttagttcttttcgaagtaacgcaattttttctgtctaattggattagatgttaggtgcgagactgagcccggcttttgagaaagaatattcagcgtgtgctggacgcgagacgtctctcggcttatgtccacaggcttatgtatgatttaaagagggag

SEQ ID NO: 51299 - DNA, 414 bp, Arabidopsis thaliana columbia
tgattcactcaacaacacttgcaaaacaaaattattgaatgagcaaaatgttatatattcaagaaaatgaatcaatgatagtttgacataacaaaagaactaaattgatgtgacaataacaacatgattcagacaacagaagaagcttaatcaatgacaatgaaattctcatgttttatcacccaatttttttttaacaatttcagtgttaaaatccaaaattttgcaactcaaatgcccaaataaaaacaaaatttcgaatacaaaattgttcacatgcaccaaaagcaacccaccaaaacattactggaaccaattaccaaggcctgccaattcgactaaattttaagaatcgaggaagaaaaccaaactacaatcacataaacatcgattattgagtctcaaagattgata

SEQ ID NO: 51300 - DNA, 562 bp, Arabidopsis thaliana columbia
acagccaatcagaacattttgattaatacacctcatttacgttgaccaataaaaacttactatttttccatgtcatcccatcaacttaacaaaattaaaattagacatgggcctaccccaaccaaactattttcaaaattaaaatctatataaaaacataggcctaaacttcctaatctagaaaacttaggcctcggaaaataaaccgcagcgaatgtaccgaaccaaaactgatgaaaaaaactaaaccgaaccgaacaaaatatttgaaaataactgaatggatattaaattctataactgaaaccgaatggatacagaccaaaagattttggataaccaaaaatatccaaaatataattatatttttaaaaatattagttatttctaaacctaataattaaaaatagatatacgtataatagtaaaaatactcgaaagtaaccaaaaatatatgaaaatatcaaaaataactaaaatatctaaaaatatttaaacaaaaataaccgaatagatattaatttttaaaccgaatccgaactgaaacgaaccataattttaa

SEQ ID NO: 51301 - DNA, 1017 bp, Arabidopsis thaliana
tccatttgtttagtgattagcactaaggcatgctttgcataaaatattatctaagaaatctaaacatgtattaactaatgattagatcttgacagcttcattgatatttttttcaaaaggaaaagtcaattcccaaactaaaagatgtttgagaaagagtcaagaagcacttcgcatgatcacaaagatatgattccataatgaattaatagaatagtcttctaacttctttttctttgtctttggaacagttaagcaaagtgattaacgagtcactaagactttaccctccagctactcttctaccaaggatggcatttgaagatctaaaactaggtgatctaaccattcctaaaggtttatcaatatggataccggttcttgctatccatcacagtgaagaattatggggtaaagacgcgaaccaattcaatcccgaacgttttggaggcagaccattcgcgtctggtcgccatttcatcccatttgcagccggtccacggaactgcatcggacaacagtttgcgttgatggaagctaaaataatattagccacgttaatttcaaagtttaacttcacaatatcaaagaattataggcatgccccaatcgttgtgcttactataaaacctaagtatggagttcaagtgatattgaagccattggtttcatgaggattttcgcggtttaaatagtttgatttggaatgccttggtaaagcacggctagaaggaagattttgagattgagggagattttgaatttcatgagggatacaaatcggaataaatgttactatgacatcaaattatgttaattctttttcctcaaaaagacattttctattgttttgtgtaaagtgtgacgagaacaaactcaaaaacccgcatgattggtttatgtaacatgttttaaaatatagtatttgaaacataaacttgtgtagtaaatgaatttaatatgatctatggtagtagaagaatatgtttatggatgacatatatctttgaattgtta

SEQ ID NO: 51302 - DNA, 566 bp, Arabidopsis thaliana columbia
cctaacatttgtacttattttctttaataaaatcagttttaaaattctttctgaaaagttcacaaacataaaccagactcattgattacgctaggctgcatcctgcatacgtctctaatgaatccatatgttgaccaaaaacaatctaaaaaccattaaactaccaatgtggtgatgacacgtttatcattatgtttttatttataaaactttttgtttttggcgtgataaatacaagattataaaacattataataacaatacacgcgagtatcccaaaatcagatactgcaagtgtcaaactcaaacatctatcaatcttaaaattctctttcataagaagtcacataagacaagaaaatcactttcacaagtttattacaacaattttttgcttgtgacgcagggaacaccgagacccgacataaagtacatacgtgtgaaattttagtatatctcgcttattacatgccacgtcacatatgtccgtgtttgggtcaaaggttttttagcaactaaggttaggaccagggtcacaccaagctgtccacaatagtctctatagt

SEQ ID NO: 51303 - DNA, 596 bp, Arabidopsis thaliana columbia
  unsure (1)..(596): unsure at all n locations
tgttcctacagttacattttcgtgaagctaatccaaagctgaaaactttgatcatattttttggggaggtagggtgaaagcaccgtggccactgacagacagagaagctgttctgcagtttttcgtattcgaatactttaaagatgatttagtcatcatcctacttaactcggtnaaaccatgttagctttgtttttttgcatcttaatccagttcttagtgatttgacagtatcctaaactcttatctattagtacatctttagatcgaagtggagagcggcagtgtagctgaagtgaatgcggtgaggattgacttcgtaggcggagttgcgatacaaaaagtgactccagagaagagttacataaggtgagtgttgagtgaatgagaacatgtttctataaccaaacatttcgaatgtctttggcgggttttttgaatcgctaaacttttgtagatttatagcggaagtggatataaagctggacttggttccccatctcttattaattttatgtctaggcagcttcttggtaacggtttcaaacttttcaagaaggtcagttccagttttatttactcacaaaaacttgata

SEQ ID NO: 51304 - DNA, 536 bp, Arabidopsis thaliana columbia
atattgtgagtgttccttgattaattacaataatacaaaccgagtccccaatcaattgcccctcttctctcgagcattttctaaaagccgactcttaaaagaagccaacacatattttcatgataaatctctgtacgatggtttgccatggttttgacttttcaacattgaacttcaaaatatttgcaatgaatagatcgagtatagatacgtatagcggactgaaatcatctgaaatacgaaatgaaatgctttgaacttataacatagatgttgttttatatatacaagtcatacatcctatatgacttgtatatataagtaagtcatacatcctaaaaaagaaaaaaagaaaaagttatacatcctataatagatcctctatatttaaccggatagaatccaaacggtaacatttattattatatgaggggattgtgaacgtaataagtgtacaacatattttctacaaaaatcaccgttgcgaaatttcctaacatttgtacttattttctttaataaaatcagtttttttt

SEQ ID NO: 51305 - DNA, 474 bp, Arabidopsis thaliana columbia
atatttttaatgtataatggaacctcaaatgtagtgcataatattttccctatttgtttagtagattaagaaaccagttgttatttcttttttaagagaatataaaactttattcagtcaaaaactttggttacataataagcatttaaaattgaaatatctacaagactcaaagtgaaaacacacagcattgggagctaaaacagagcagatcctatcataagcaactacctgcgtgaaccaaaccagagtatcaagccatcggccatatacgtcgagcctagtttcttgagggattaaagtcggtttctgactattcgcgcagatgaaggctgaaggggaattcaccatgtcttcttcagtttctctcaagccatatgaatatatgatgtggacagttgtgtgatgataacatcttattttcgtctattttagctatagttttctaatgttttcaataagtggctaagtgtt

SEQ ID NO: 51306 - DNA, 1049 bp, Arabidopsis thaliana columbia
taggttcagatttgtcctagagaatctgcaaaagattatatcttagggtttcgagataagtcagccttgcatcgtcctggttttgtcactgaggtacttttaagaatcattgatttatctaccatttgctttcttgatctgagttttgtgattgatgtttttgtttgtttatgaagggagatgatcggtggctacaaatggctgcagatatggttgataagaagaataagtgtgactatgcggctttactcttctatgcatcatggtgtcctttctccagattagttagaccaagttttgatcttatgtctctgttatattcatcggttccacactttgcaattgaggaatcatcagttaaagctaggtgggttttgtataaaagactgaaatcgtgtaatttgattgagaacttcatggtttgatgctcagttttttttgtggtgtggtatggttcagtaccttgtccaagtatggagttcatgggttcctactatcatccttatgaattcgacaatgctcgtagtttaccggggatcgagaactcttgattcccttgttgccttctacactgatgttacgggtaaggtatttgagttgttactttggctatatctttgtgttgttgtgtgcctcagtcttgttgtggttgctattgtgctcctgttataggttgtatataccaattaagatttcagcagatgaaactaaccaggacaaattcattcatgtaggaattgaaacgatggatgcaagatgggttgagagaaacagattagttcctcatttccacgcagagccagaaaattgcccgttcccatgggcaagaagatcacccgagaatctgcttcgccaagagacttatctgacgcttgccacggtgttcgtcttgttgagattactacacttgatttccccacaatggttgtgttcgtgaaattcacttggggacgggtgtaaacatgagactagggaacccttggaacatactgtgaccatgtatcttaaagaccttgcatgagtagcaatttgcaggaaggagccatgaa

SEQ ID NO: 51307 - DNA, 526 bp, Arabidopsis thaliana columbia
atctattatttgttaacaaaatttatattcctattgagaattcatatcaccagttgtatacaggaacgtatacaaccaccagatttattattacctatttatataaaaaaattatattgattatatcaatcgtgtgtagtataaaatttataaaatcaataaatttggtcaaacaaaaatgcagaagactgggaacgaaattaggacccacaagacagctcccactcacttgtgttacatcaagcctataatcacattaccaaaatagatcataacaagaccaattaaaatagtttgactgtcttgtcttttatagaataacttttgactgttttcaaatttacgtcgctgatagaaattactcttttttttatcctgttttcaccttttttaacggtcaatcctcgaataggtcaatgtttattgtttagttgctaattatgatcaaatcttcaaagttaactttgtctcgactttgactatattgacatcacataacatctttttctcgattgaaataaaactt

SEQ ID NO: 51308 - DNA, 575 bp, Arabidopsis thaliana columbia
gttgtcccgcctgatgaagtcgtgaaacaaggtgtggatgcggttaaaatgtatatgggtaagagatgggtcagcatgttggaagaggaagagaagatggcgaatatgaaggatgagatggatcagacaaacaccgattggctcacccgaaccacctcgaagctgaaaacgtatgttactgaggtctcggagtatcttggctcgaatccgcctagagatccttaccttgaccagcagctatgaaatgactttgagcttcattttacattttcgtgacgatatctcaagtatcagtttccaaagtgatcttcagtcttgagttttcctgccgctgcttctctgtttcggtatatagtttttttttctcttttatttgcttctactctttactgttgtttattcgtatttgtctcataacatttcatttatctgtttaccttttcccctcttttttctgaaagaattttatgttccttcaacaattttgagagatggtacagaagttcttttttcaagtttacgaatgtatggagctttattcaaaacaaaaaaaactagaaaattaggaagaattt

SEQ ID NO: 51309 - DNA, 489 bp, Arabidopsis thaliana columbia
agtgtgctcgtaaagtccacaaaaaccgcggacgtggcggcgccggtccactcctgattctcagtctcgaactcctattctctctgacgccagatgattccaatctcagctcgtagttgaaggccaggctggattcgctcggtctaggtgagtttgccgcctgcatatggctacgcttgtgccacgctgactcttctgggctgacagtctaaatcccgtcataacctaaggtatggacgtttcgaagcatcgtgccagctaaggagtcgtcccgccgtcgaagctattcgctattttgaattcctccttgtctcagcaattcttatgtgatacgacgacctaagaagccgcgcgaaccatactgggaaacccgtatccttcaagaaacgaagagacctgtccgattcgctgccgtgaagctatataatccgccatgagttcgagtgggggagatgcaaagctgttcgctagggtatgtggaaaaaaaaa

SEQ ID NO: 51310 - DNA, 393 bp, Arabidopsis thaliana columbia
aattcatttttgataaaaatatacacatgtggtatatctcttaatatgttatatatatataaacaacacgatggcttaggataaaatcattaactttctaatgatatatcaacccgcagtgtaccgcgggtcaatctctagtgatgttgttattgtaggtgtgaaatctttggatttgataatttagtcagttagatgttctctctatctcgatctctcacgagtcatggtgactctatgtgtctcagagagataagaagaagttgtacatgtagtagtttgattgttcccaaattatcgtttctctaattccatttgttctctcaatcgaacccttttggtcttgtctttatacctatctatgataatttgaagtcaattaaaagatggata

SEQ ID NO: 51311 - DNA, 537 bp, Arabidopsis thaliana columbia
cgtccactagaaaacaagattatttatagaaaatttggtagttataaaacaattacatatacaaagacacaactgtacacttgtaaccaaaattgaatatcaagaagtttgttcttatcatattaattgtcaaaagctgagtgattcttgtgacattgtgagcctgactgtgagtgtacacaaaaacttttaaacccaaggagatatgaatattggccgtggatggtaagatgattaaatgtagataaattttgggtagtttagaagttatatccacatttaatgaatctctgcatcacccaacacatacggatcctttaatttcatatgcacagaatcaaatgccaacctacttgccaattttggcatcatgatggttttctcatttgagataaaacttttaggtttttcttgagtagatagatactagtacttgtttacccacatggtctagcttcagttaaaaaggttacatatgtcatgttcgaaaattaaatacatatgtttatcaagttctgtagcatcacatatataata

SEQ ID NO: 51312 - DNA, 557 bp, Arabidopsis thaliana columbia
tcattcgtgttgatggtcacagatgatattccatcagatgtgtttctgattaccatctttagttttatttcacacaaggaggtcgaaaagtcgtggtgtatggtttggggaccgtctagtgaccacgagatcgggctcgagcttctgatactgtaattgaacaacaacgggattagaagtggacaataggtttgcaatctgcagaaagatatctttgcgggtactttacctgttatgacatgaatggtgagacaaaatctttggtaaatcgggaactgctgatggactgctgcttttcgccaggcgagagattaggatgaagtcaacagtatttggacttacctgtttcatcaaagaaatttgagttcaccacagttccgatgataagttaccagggaagtgatactgtgtttaagagagtaatacatatttccaaaaaaaatctcacgcacataagacatacataagatttatgaccctgaaagaggatattcgcttacctgaaccgagggtccctgacatgacctttcactttcatggaagcttgctacaggtga

SEQ ID NO: 51313 - DNA, 312 bp, Arabidopsis thaliana columbia
tgatccggtgaagtgttcggatcaagttcagtatctccatctctgcttctttagggctccttgttcgaaggaattaaaatgttttattcacatacgcttttggctcgaaaggttccattggggacggtgtggtgcgccgctcatgtgcaccaacgcctcaagaagtctcagtagacctccatcacaatccccgacactgttcgttcgtctattcctatcttcaattttcgctttttgatccaaagttcgcttctatgctctttgaatcccctttgattgtatccatctcgaaatttcaaaaaggcaatacga

SEQ ID NO: 51314 - DNA, 446 bp, Arabidopsis thaliana columbia
gatccccacctaatattaaaaagaaaataaaaacaagatccaccaattcaatgcgatagggtaagtgactaaatgttcattgccgttgtcaccctttgaacccaatttaggactcaaagagccgtctgattatatttaaccttggtcgaagtatttctaacgagctggtaagtcctcattggtccattatattcactgtccacaataattttaattacttgtacgactcggttaactccttctaggaaaaactaaagtgtacctacctagtacatacgtacttcttcatattaccacaagttttttttttctgtccttgcattcaactacgtgtttaaagtttcggacccaaaattcggcccaaaaacaaaaaccaaataaactattgcaaaaatctttgagatcagatcacactatcatttcaagttttcaaccaatccatactc

SEQ ID NO: 51315 - DNA, 622 bp, Arabidopsis thaliana columbia
cctaatccagatattcctgaagttgaagaaattaaaatggtgattgattaatgggtgtttcatgaaaaaattgattatattttatgtaatacgtttctacagacgcctttggtttcacattgtcataccattcatcatattccaccttgacaatcctaaatatatggatgattcttaatttgtttgtagttttttgttaggaatattattctaattaacttcattatatcgattttgattgattattttcctgtaaaaagaaatatataaattatgaagagattatataatacgtagaatataaaacactaaagaggtaatagtataacagaactattgaaaagatagacaaatctttaaaaaaaatttcggttattaaatagtaaagactgtgtatgaaaacatagtgagaagatgagaatagataaatctttaaaataaagttgagtttgtaaatagtaaaatgtagattatttcagaggataggtttaagggtaaagttgatgaagatggtgctttaggtatcagaaatatattgtaaaaattgagtgcatgattttaaatttaagttgtggcatagtggtgtaatgtactaaaggttaatgagatgaaaggtttgagt

SEQ ID NO: 51316 - DNA, 366 bp, Arabidopsis thaliana
tagtagaggccgccagtgtgctctaaagaaattgcgtcatggtcgttccttaatcgggatatccctgtggatggcgtgactgccagtgccaggtgtcctgcgccatttcatcgagtgtgcgcgttacgcgcagttcagttcacggtcggctttgctggcatccgccagtaggccggaaagtcgccctcgcgacgcggtgcaaaatgataattaaccggtttgccgcacgtttgctgaaggcattaaccacgtccagcacgctgttgcctacgccagcgccgaggttgtagatgtgtacgcctggcttgttcgccagtttttccatcgccacgacgtgaccgtccgccagaatcattacgtggatgt

SEQ ID NO: 51317 - DNA, 475 bp, Arabidopsis thaliana columbia
accggtgatgatatcctgaaaagaaatgaccataggcttgatgaatctgtggtatctcgtgaccacatactactgcttcaaacaacagctaaggctcacaatgcttcaatgaagtggaaaaaccctaacttgccatttctcatccaaatgaagcacaaccccagtttcaaatccgtttgagaccaagactacatattgcctaaccaattgctaaaactcaaaatgctacaagtgaacgggaaaaaccctagcctgccatttctgatccagattaagctatggtatataatgctcaagtcaatttcaaatctatttcagcttatcggatgcaaagtactttcaccaatcaaatcgaaaagggaaaccaaaatcacgagagtggtttgagaaaatggatatacaaaacccataaagacaatatatagcagccatttctactctaaagccgtaaggattgagcttttcccgtaaattg

SEQ ID NO: 51318 - DNA, 523 bp, Arabidopsis thaliana columbia
tgagtagttcgatatggacaatttaatccccattgcaagtgtttgactcatatttgtgtttggtatctgcaggaaaggtttgatcatccatacatttcttttctctactatggagctgacacagctggagatttcatccctgtcaaacaattgcgtgagaagtacaacagacctcggcatgaagttccttttgattcacaagacgaagattaagatgaaaacctaagagttcacaaccgcagactcgagcacaaaccacgagaaaaacagaactctagcatagctcaaagcatctagcatccaacttagagatgttctgttggttttatacccatgtagatgtagttatcacttagcagttagcacgactgttcttgctatatacactgaaacaagtcaactttattcgagaatgctttgtgtataaatgcttctttgttcatcctaactgacttatccagaaaagccaagacaactaacttactgctattccattgtgctatagcctgcaaatcttgctcag

SEQ ID NO: 51319 - DNA, 568 bp, Arabidopsis thaliana columbia
tatgagtcaaacagttgcaatggggattaaattgtccatattgagactactcaccttatcgggtttttcaggagctaacagattgtcttcagcaactgcaatatcagatccattgtcaagtaatagtgagattgttcagtggttaaagttgtgcagcaggaagatgttgagatccaaaggacttgaaaactcagagcttaccatatgccactagtagatctgggtgcgtccgaacatcgactagaacctgctagacacatgcaagagattaagatatccatgtttcttctgtagattgttcatatgtatatgaatacactttaaatcttaatgaacatttgcttcagaaccagaacctgataaaatggctgattggatccacgaggtaacttttcaacctctgcagcttccatccaagagcttgattcactgcaaattggatccataccacacactacagcccggtaacctaaacgaaacgaaaccaacataagttcctcattatgaatgtaaccaaagtgagacaagcactgagataatacatatgaacgatgtacaaaagttttgt

SEQ ID NO: 51320 - DNA, 683 bp, Arabidopsis thaliana
tgtttctctctctttaatgggtggtttaatcgatctgaacgtgatggagacggaggaagacgaaacgcaaacgcaaacaccgtcttcagcttctgggtctgtctctcctacttcgtcttcttcagcttctgtgtctgtggtgtcttcgaattctgctggtggaggggtttgtttggagctgtggcatgcttgtgctggaccccttatctctctaccaaaaagaggaagccttgtgttgtatttccctcagggacatttggaacaagcccccgatttctccgccgcgatttacgggctccctcctcacgtgttctgtcgtattctcgatgttaagcttcacgtatgtaactaactctctctttctttctattttttgttttgttttgttttcttcatttatgttttctcctctgctctcaaagcagagagatatgggttttgttctgtttttctgattctttgatttttttaattgtttgtttggtgaatctgagttgggttttcgatacaagtatggagatttgtgcctttggtttattgaattgtttgagacaaacgaatttatgttgggagaaaagttcctcttttgcccatttgcatttcttctcgtggcattttgatgacgaatacttgaaatccccataaattatcttcagttttttctctgatgataatgaatttga

SEQ ID NO: 51321 - DNA, 770 bp, Arabidopsis thaliana
ttccttatgtttttctttgcaatgccaattctttcactctccgagaatccaaccaatttcagcgagagttgcgaagacgggagtggagaaaccggttcaagctttggcatagggttcgatttggttcttgattttggtttataccggaatagctgccccgaagcagagtctatcgtctactcgtgggtggaaaccacggtgttagaggatccaagaatggctgcttctcttctccgtcttcatttccacgactgttttgtcaatgcaagtcacatctcatcttaagtttgttttaatagttttggtctatcatctaatccccgtcttttatataccattgaaccgggaaggattatattatgttagttaaaccgtgacaaatctaaattgtaccggttaagtagggaatgagtactacgaaccagaatgtgtttttgtttttgacttgcattatgcattgcagggatgtgatgcttcggtgttgttagatgacacagaaggactggttggtgaaaaaacggcgcctcctaatctaaattctctacgagggttcgaagtgattgattcgataaagtctgatattgaatctgtatgtccagagaccgtctcatgcgcagacattcttgccatggctgctagagattcagtcgttgtggtagttatcatcatattataaagttgatgaactcaattcaaatcgtctatgtttaacatttttaaatcgggtttttgaagtcgggtggaccaaggtgggaggtggaagtaggaag

SEQ ID NO: 51322 - DNA, 567 bp, Arabidopsis thaliana
gttatgaagaatcgcctaaaaaaggagctaaagggtggttaaagaagttaggtgtgttaactcatgttcttgacaaaactgaagagtgcactgatggtgagtcaacgagatcatcgatacggaggcaattaactcgagttcagtcttttaagaagcaattcaaggagctttcgtctctgtgtgtcggacaagagttctctgcgcatgatggatccatagtagtgatgaagttttctcatgatgggaagtacttagctagtgctggtgaagattgtgttgtgcgagtgtggaacataattgaagatgagagaagggacaacgagtttgaagtggctgagtctgattcaagctgtgtttactttggaatgaatgacaagtcacagattgagcctctcaagactgagaatgagaagatcgaaaagagcagaggattgttgaggaagaagtcagaatcgacttgcgctgtgttgccttcaaaagtctttagtatatctgaaccccgcaacacgagttccgaggacatactggtgaaatcttggatctttcatggtcggagaaaggggtgtt

SEQ ID NO: 51323 - DNA, 677 bp, Arabidopsis thaliana
  unsure (1)..(677): unsure at all n locations
cctcagtattgtatcgctaatttctaagaaaaggatataactcatacctaaaattacaactcgtacccaaaactcttcctccttgtttaccatcacaacagtctgaatacatcctgaaaatccattccaaacacgaagagcaagttgtaaacactaagtcttttgtacactgcaccattgcgtacacctttttcgtcccaattctcttctctcctgccgcatacagaaccaattgattggcaccgtctatgttctttttatcagtggctttagttgttagcttctcaaggagagcggatgtctccctgttgaacaactctcgattgctcacgttctttgggttggacaaatagaaatcgttctcgtaatcgatcttatggtaggaatcgacagtagatatctcgaaaagacattgatcatactatattattgccccttgttacctggacatctctttcgaagctgtcatatgcatatccataaatatcaacaccacagtcaagaacaatattgcatggttgaattcatataatagtgcatttgtactagccttaaatgtataaatcttttgtnttgatatctaagatttaccaaaaaaaatattaatgtgtgtactgcacaattatacaggtaacatgtgactgataaataatatattgaattatagtaccctgaga

SEQ ID NO: 51324 - DNA, 522 bp, Arabidopsis thaliana columbia
tgactccatcattaaacattgtttgaaatgatcaattacaatggttggaaaaataccgagggtgtcgatccagtatgcgagttcccctttgtttactctctaaaaataataagtatgagggagataaagaacaccagaaataaaaagaaagtgaatggtcgatttgttatggtatagtacaggaatgattctagaaggttcttaaatgttaacttgattgatgagacctagcgatgagagcctaatagatatagttgagtgctttggtatggaatctaggatgttgtgtgggctagcggaaattacatagtggtcaggatttgactagaactgtttagtgcatggatttggtttgtatgatcagggtaataagctagagagattgggagttcctgtgttttcaaaactcttccacgggttcggcttttatgttttgcttgagggtaacaaagctaagtctgggggagttgatatcctcgattttcactgcttttagctatgatctaggtatagtttttagag

SEQ ID NO: 51325 - DNA, 281 bp, Arabidopsis thaliana columbia
gatcgagtagaggatcgagtaggaggggcgagtagatcaatctgctgcttcatctgaggctgccttgatctagtaagagggtcgagtgaattttagcctcatctgtagctgcctggatcgagtaaagaggtcgagtgaaatgatgcctcttctgtagctgcctggatcgagtgaatggatcgagtagagtcctttttagctccttctgcacctgaaaaacacaccacaacatgcaatgcgtatgcaagaagatcctagatgcctaaatatgcaaaataagc

SEQ ID NO: 51326 - DNA, 608 bp, Arabidopsis thaliana columbia
ttatcggttagtaggtgctaacatggtttcaaaatacaagatcaaagcattaagttcaaattcgattctagtccataagtccctatcactctgcgggtgtgcaatagttatagttctttattcagttgacctagttcaagtattcatatgagattttgccaaaaaatgaaatacctaaggtcaagtattaggtggcgttccggacatacaagcattaagattaaactcaactagaaagaatagtgtaaacgatcaaacaaaactatagaaaccgccaacctaaatcagatctaaagtccccatgaatacccttcgaaacccccctaaaacctaactagagatatactcacacatactcaaagaacaaaacatcatataaataagaaattgcataaaaaagagtatgggtatagaaaagggtttagagatcttctctggaaattcaaaccttgaaaactcttcttccttttacaagtagagaatagagaattgaagagaaaagagagatctaatgaagaacaagagaagggcgacttggaggcggtgagaggccaggaggcagcatattttgtgggtgctctagggttcccctagactttgtatttata

SEQ ID NO: 51327 - DNA, 544 bp, Arabidopsis thaliana columbia
attggtgaggtcgaaacagacacataaagtaaaatatatgtttgggtgtttgttttttgttgtaatttagtgtttacttcatgttgggtttgatccatttatgtttgctcttttgcacgaagatttgagttaaatttcagtaggaggtaattgaaattggtaagtgaattactttcaattggggttgtcgattgatgttcatatgagttgagtagattttttgtgatgttattgtgtactcgtgtagttgataactatgttgtctctgtattaagaactgaatcaatgtctgaaaacactcgatgaatagcttatgtctcttagtaacagggttttgcaaaaacttgataagaacttgagaataaaaactggatacaaaaacttgatacatgaaaacttaggtctaaacaatgtatataaaccctaaaaacgtccagagactaataatgcaaatagggaagttttctggggaaaatcttctcttctgtaaactcgaaatcgtctagaacttttgttggccaaaactggtgtctcctgaaccaaa

SEQ ID NO: 51328 - DNA, 596 bp, Arabidopsis thaliana
atgggcattctgtgaggtagttcatcgtagatctctgttgccatcctaacccgtagcccctggatatttgaatcagtaatgccatcaaaagaaacaccaagcaataaacattcaagaatctttaacgtgtaaacgccgcagtcccggtgatagtattctgcgggacccttgtaatgttccttcgctggaatgaaaattgggtcgtattgcgggacacggacttcgggagggataagttcgctcatgatctgtggaatcatcctcgtgaacggcctacagtgttccaggatttttccatcgcttttttttgtatgacatccgatgatgcaatcatagtagtccacgtgacccctaggcaagtccacgtgaatgctcacccaatgattacctccggtatggaggatagcatacaagtgatccacatctgttatccacttcttgtttgtcgggtcttctccacccgtatcgttgatccaactttcatacgcggtacctttgaaagaaacctcttcggcttcatagtccactgtgtgtaaccctagtcccattgacgtgaccacgggtctagaatcatgcgtgtcgctgtagttggggtg

SEQ ID NO: 51329 - DNA, 150 bp, Arabidopsis thaliana columbia
ggatccccctctatcaaccgtggtcgagtaaccgcagctcaggccactagatgaaaccactcgaccccctggtcgagtatcacttcgtcacaccacctaaccacactcggctgttcactctaccacactactcgaccccctggtcgtgca

SEQ ID NO: 51330 - DNA, 504 bp, Arabidopsis thaliana columbia
gaggatcccatgacaaaataaatttttgtgaatgtgcaaaatagaaataccacaagaatataagacgtttagatgcagaaattgttggggtcggattgcacccaggtaagcgagccaaccatgtttcaacgcctcgggagacatcgtagagttatcccgaatcggggcactagacacctcgtgagatcgcatcaagaatccataccgaggcgatatcgagaatgcttcggagcattctcgtgaaatggtcccccgacccgacctcgaaacgcctcggacataaaatctggcaattcgtcccgaggcgggctccaaaacgcctcgggaacgtatcctcgaataccgcggtccgagcatcccgagcacgacccgaggccagctaaatttcggctcggaagaacctcgggttagacgagaaagacttcaaaaaagaacttagccggtataagttcagtcacatcatttccgaaaacccggaagaggcaatcttcagagatatcaccg

SEQ ID NO: 51331 - DNA, 468 bp, Arabidopsis thaliana columbia
gagaaatatgatataggaaatgagcatcaaaagagagggctacttggaggacaaagattggtcgaagctggtgagacgcgtggcagaataacattggttgaagctggagaaagttgttatgaagattcttttaaacgcagtctctgctgctattcatcattatgctaaaatttgagtttgttatcttcttcttcttcaattctctctataaactctttagggtttgatatttcattgttgatagagctgtttctacttctaagctctaccacatgagatttggattctcgttttatgaacgatgattcaattgctgtaacttgtacgattgaatttgagtgagatatagttttacagtatcaaatgtatcagagccatctctttcctcagaatcgatgggcgtggaaacacgtgcaccggtaactacggcggacgatacagtcagaacttgtaatccatcactgagta

SEQ ID NO: 51332 - DNA, 540 bp, Arabidopsis thaliana
tgctgacgatatcaataatctccatacatacataataattaaataaaaatagatggtgaaataatgtttgttcctcatattgaaaagttatgtacgtttatgtgtaataatgtacgtacatttttgttggtaaattaatgtatgtacatgtgtaataatatacgtacatctttgtttttgaattaaattattaagaaaaaattattgatacaatattaaaccaatattagcagtggctgagatatattctaagacgtttatacgatgtgattttgaaacattctgaattcttgacgacttgagcagtcaaatgtcatggacaagtatcatcaacgcataccatctccaatcttataggacatgatctaggttgcttgtagcaaaaagattgtttgattgcgagataagacattgtttgttgtatgacttttctgttcttaaaaacactttccaatctatagtgtacgtacattggtacaaaccatgttgacacatacttcttggagtccagctggtgtacggtcaccaagtgaaaaaagt

SEQ ID NO: 51333 - DNA, 426 bp, Arabidopsis thaliana columbia
atatttttctttagaaatggctgcatgattgtcgtcccgttaatggtaatctttcagacacatacagtacccaaacaagtaatttgactaaaattttctctctgtctaaatttcagaagaaaaaaaaactttaggatatattgccaaaagatcttaaaaatgggtcatatcattttgatcatatagaatccaacgacctttatcttttcgccgaactatacttttttgtgtccatttgtttgactttctttcacacacacatccacaaagaaaaaaggaccattcttctccttcttctagtcacccctcgtgcctctctttaacaccaaacccaaaactcacttctctttcttccttcctctccgatctccgttcacatctctctctcatctggatcttcttcttgttttgccttgtgggttgaaa

SEQ ID NO: 51334 - DNA, 335 bp, Arabidopsis thaliana columbia
gatcggacactcattgtaatgcttaagaggattaatcaaaatatttttgtgaaaaatatttcaaatattaactttcattacaaataaaggatttttaccccccaaaaaaaaaataaagtacttttataattaaaccaaaatattataattacctaattataaatgaatattttatgattatcttacataaaagatcgatgtttacaaaacaaatcattttcaaaagaaaaataagtacattaaataataagatcccctttgatttatggtttatttagaaagtcaaaacgcgaaaatgttcgaaaatattataaagccatttattcagtagatgt

SEQ ID NO: 51335 - DNA, 226 bp, Arabidopsis thaliana
catatccattctcaccttccaaatctccccactctctctctctctctctctctctctctctctctctctctctctatctctctctatctctctctatcttctcttttctcctctctacaacttcttcactaatgggagcgcaggataaacggcgccgttgcgagcagatatcaaagtgcgatgttaatgactgtgtgaaccataccgtggacgcagatcgagacgg

SEQ ID NO: 51336 - DNA, 475 bp, Arabidopsis thaliana
gctgcagaggaaattggattttggccgtcgagtaggtttcatcaaagctctggaaatttggtggagtggggtggagaagtgtacagcgcatcactgccgagtcctcaaatgggatttgggtattttgttgatggtcaaatgcgctacgatgcatatatcaaacggatatctgtaatcgacggttttaataagattgaccgcaaagtggcatataccgaaaaatttgtggacgacactcgtggctaccaagttatagacaaatacaatattcccggatactcaatactcggtcatataatgttttacggtggtccggggaatctctgaatatggttaattacatctctgtgaaatgaaaattaataaaacattacattgacttgattatacaataaatatcaccattatgcgtttcttttggatcttaagattatatatgtttgtactaaaaaaatatttcgaactagatcctcgc

SEQ ID NO: 51337 - DNA, 505 bp, Arabidopsis thaliana
gtggcgatctatatatccacatttacttttataccctctttgcccgttttccttcgggcaacttcagtttttgtttccttgtatttattgacttttgaataaaagaattatttcttctttacaattttagaaaattggaaagctttatttattgtctgacccttttactattcttcgggcagctgttcttaaagacatcttccctcttcctcagacacagcttcttctactggagaagaggaggagaacacaaatccaattcacactggaaacgtaagaagaagcgatcaaagcttaaacttctctttgactcatcattgttgttctctgtgttttatttttcgtctcaatttcttgtttgaacttgtgaaaatcattgaattgcaattgtgtagtgttgggtcggatcctgagtgatatttcgagaccgatgatgtggaagaactatgctgggttgtcgaaggcagcggcacggctaagaacacacggatctcggcggtggttt

SEQ ID NO: 51338 - DNA, 535 bp, Arabidopsis thaliana columbia
ttgttgtttatatcttatatagtactattttcaaatactcaaaatacacagtttatgattttttagattttatgtggggactaaacaacatctatcggtatatagttaatcaacaaatcttctggtgaagatagttgtaaaagtatctttcaaaatgatcaactaatcattacatgatcatcatgattcgtgatctaattattaaatagtactagccgactgcagataatgttttataattttgtacatattagcacggcaatgtaataacaataacataatctgcaaaatatgtagatgtttgaacggtatctatttaacatgaaaattattaatttcctaagttcttaaccaaccattttaccgatcgatgacatcacacaaatcttaagtattcaaatattctttttgtaagccatttatcaggaaaacaaaatctatgagacaatatttatcctgtctaaaaggcaaataaagagagaatacagcatttatatagttcccctcttctcatttgatgattagttgatgattt

SEQ ID NO: 51339 - DNA, 532 bp, Arabidopsis thaliana
cgatcattgacggctggaacagaacttccggacaccggaacctctctgctccaatggttatcacttgtccatcaggaagctcgaagcttttctcaacggacgagcttgttttggaagtctctagctcttgctcgaagtctagagcaatgtaagagagcttctctttcatgtctctaacaatttcacgttcagcagttgtggtgaaggagtatccacgctctgtgaggattttcatgaggtggtccgtgaggtcacgacctgctaggtcaagacgtaggattgcgtgtgggagagcgtaaccctcgtagattggtaccgtgtggctcacaccatctccagagtccaaaacaatacctaaacaataattagcaaaagaaccaattagggttgtccataaaagcataaccaaatagtccttaacacagttcatatctcctcacccccagcatgccacaacactggttatagattggatcaacacaaatataagtgtgttactgaccagttgtacggccactggcatagagtgaga

SEQ ID NO: 51340 - DNA, 503 bp, Arabidopsis thaliana columbia
cacaacaactaaagccaatgatgcaattactatctccatttgctgatgtttttggtctcttaaaatttttgagaattttgatgaagaaaatgcatgtgctgatttgtctttagtacttatagatttgtgttcggacaataaaatattgtttgtaaccgtcgaactttggcctttactcaggttcctcacgacctctggccacatctgtcttccatgcctcaagtctttgtattcttggttaaacaattaactaatatgccattatcgtcatatatcacacccccccccttcagacttattaatgacttaatcaataataagccatgcgaaatccatcttattctaagagaaacacatgcagtaaatgaattaacttattacgagtcatcaattgtctttgcaaataacataaaatggtcatatgtttagtattctcaagtttttatggaaagtaattagtcaagtaaaaaattctatattaacataataggaaagttattata

SEQ ID NO: 51341 - DNA, 597 bp, Arabidopsis thaliana columbia
tgagaggtgagacaagttgcctctgtaccaatgagattgttatgggtcccataagatctttaagtgaacccttcttaaaacgcttttacactttgtgtatcaattcgatatgacccggtttaactccggttatcttgcaaatacaaagctggttaagtaatggtaacgaactacatcaattttggtaaataaaggtttgtcatccatgctttggcagtgttgtcaatttaggcaacaaggcaaagaacaaagaataaaagcaaaagttttgtttcccccaacttgttcacatataacattatgtctctatgtggaagaatgcttttaaaaaaattcaaacataattgttacaaatagttattgtttgtcaatataatgactcatataaattcaaacatacccagcatgaaaaatgggaaattttatcaatatatattagctattcttgttgttgtcatcaatgatgaatggctggtctttagtatgccaaatcccattatgtgtttccctaataacattaacaataatagtgttaggtggtagtacctggttggtgaaatctaatggtgaacatgggcaatataaagatacacttat

SEQ ID NO: 51342 - DNA, 476 bp, Arabidopsis thaliana
cttactttgaagcttttttttaccaagacaaagtcacagtcagtgaggacaatattactacgtacttgcaggacagcggataacaaaagacaaagcgcaacaacatacaaaacaagaatcagaaaggagatgatggaagaaggttacaggatatggggaaatgtaggcgaccaatggagtgacttacaaggagaatattcaggggatcgaatcgactagatggaacgtcctatgtacttcgttccctaatccaaggatctactataaccatgcctatcaatgatatgtacaacatacacaaagggtatgtctcaacttaagctctgtgttaagatgtgagcttctcctagtcccatccaaatgctacaagcgcttaccacccagattcaagagaccagcccataaattcccaaaatgtacaaaagtgactatcactataaggaatctcacatcaaaggaataagttcaatggtata

SEQ ID NO: 51343 - DNA, 748 bp, Arabidopsis thaliana columbia
tgatcttacacactcaaaacggttttttaaaactactccatctttgcccgcacagctcctggttttagtcacttgatccaatcctgttttacttttggctttgtcttcttttgcacgtggagataaccgttggagctgtgagttgttttgggtctgcgcttgggccttctgcttgttgggcttgatctttgttagattctcaatttggcccaatcgctgaaccttcttgaggatgtcatttggtaatcttgtctttgcagcttcctcttcttcatgtccgatcacaactctgatttgattcttctcttctctaatccgagttgtaatctcaatgtaagatgccttctcactaataatctgaacaacactaaatattatttcagcttatgaaaaaagacataaagtaacatcaatggaaataattgacatgtcccacacagacacacatttgacagtcccatcaatatatatgctgacgacaaaaagtaaaatgacccacctgaattttcaaagtaattcttcaaataattgacatgtctaattaagaccaaattagttgaaaacgtttgcaatggactgatcgtaatagttagtcacctgtgaacgagtttgttatttatccaccaaacaaaaacaaattgacggatttggtgggtttgggcaaaggtatatctgatgaattttttctacatctcattccaaaaagtcgacctaacccgaaaagtcgacataatagaacaagatagtg

SEQ ID NO: 51344 - DNA, 499 bp, Arabidopsis thaliana columbia
aaaaatattataaggaaaagattttttatttgcgtacacatttaaatatgccggaccggtcctgattcgaacttacgaaattaaatcggctgcacaactataagtgaattaactttttgtttttcaatttttcataatttatactaataaaaacgttgaaggataacacatacttctttaaataattttttgactagaagtaatctaaactacaaaatacactcattaaacagttattaggtttatgctgtatgacaaacttagagtaagatacttcactaatcatttaatttatatcaacgatacgacgctataagtcaataaaagaattaacttttttttctttttttttggaaatttttttagttgaaagataattcctagaaaataagttatatatttgagttttcatacaacttaaaaacagttaatgattagctatatacctatacttaatgctttctcatatctaattttgacaactctcttttttttaatt

SEQ ID NO: 51345 - DNA, 658 bp, Arabidopsis thaliana
tgtctcacttttttaatatcgttaggtggaggaatgcccttctctggaggacattcttcactaccgcagttgtagcagtggtcttacgaagtttgattgagttctgtcgctctgggagatgtggactgtttgggaaaggaggtctcatcatgtttgatgtaaactcgggaccagtgctatatagcactccagatttgctagcaatagtattccttggagttattggtggtgtgcttggaagcctttacaactaccttgtggacaaagtcctccgcacatatagcattataaacgagtacgtcatttctcaacaagttaactctttcataaagtcattttccaacgagttactctttcataatatcatttctttgcctcttttcgattttcttaatttgttctttccataacttgcaggaaaggtccgagatttaaaattatgcttgtaatggcagtttccattttgagctcgtgttgcgcatttggtctcccatggctttcacagtgtactccatgtcctattggcatagaggagggaaagtgccctagtgtaggtcgatccagcatctataagagtttccagtgtcctccaaaccattacaatgacctttcctccctacttctcaacaccaatgatgatgcaatccgctcagtaccc

SEQ ID NO: 51346 - DNA, 545 bp, Arabidopsis thaliana columbia
tgtctgaagatttagtagttgtagagaggctaaaacaaggaaatcatggtaaaatttgtgtaatcgcataattttctcattaaagtattgaatattgactcccttcttaatttcatgtccatagcttatgtatatatagataatttcttatgttttatctgcgtaggtttgacgttaagggatggcgagttgcaagttctaggcttaatagctattgaagatattctccgtaggagcggtaagtctttggctaattatggtggtatgccttgtcctgagctttacttggttcatgggcataggaataatttgatcgccaacgaacttggatacattcaaacagaaaagcacgaaaagtatattgaactttatggtaagagaattggtgagcagaaaggtctataccaagagagcctatacgctgttctacaggatcgaggaggtgtattttttgtttacgggttcgttggtactagcaaaacctttttatagtcgatcttgtctgcttagaaatttagacccaaagaaggattgtgcaatggtac

SEQ ID NO: 51347 - DNA, 1432 bp, Arabidopsis thaliana
  unsure (1)..(1432): unsure at all n locations
tttacataactactaaaagtataagtttatttttggataaatgttaaaattttaaattttcaaatggcactgcgttaattgataatagatgtttccgccatgtaatcaataacaataagatatatacagagtgctagagaaaaatgttacaagaaagaaatccgcttttatattacgatctctaggataatttaatgtcaatctcaagtattcaattccatttttagttcttcgtttattgatattccggcatgtaatcaataacagtaaggtctacgagtgctagagaaaaatgttacaagacctagcattcttacaaaaaaaaaaatccgcttttatattacgatctctaggatcatttaatgcacaaattcgaatgcataaaaatgaaacgtgtaatttttttaaaaaaaacatattaaaactttgagcatcccgtcttgtcgagtgtcgatgtcgtcatgcccggatcgtggtggtcggcactgatgcttaaaagtggtttgtaaatattgaattaaaaaaaaaaaaagtaaaatcatttaaacaatagtagtacattacatacaaaatccacggccaaaaaaggtttgaaattacatatatagcatattgcaattcaaaaatgcaattgtatacatctctacagtatttaatgcatttgtgatcataatcttatatagcctttcgaagatccgatgcgtttacgttgtgggaagcagaatagagacctataatccaatagcatctccggttttcattaacctcatacgtttgcaagattccacaaacatcctacacaaattaaatatcatcaatcccaagaaaatttagtttccttcacagcagaataatacagtaattctagttttgatatgaatgtaagtaacaaaatagtacagaaattctagttttgaataaaaaaggaaaagtacgtaaaagcaacacaaagggtaattccgagaactcacatccacggcacatctccgactaacatcaagtcaccgtccttatcctcgtaagtagcaacaaactctcccttcctctccaactctgtcactctacctaccaccatccaaaaccccaagtgtaagtaaatttaccataatatccttcacttcgtcagtccatccaaacacatcaaaatctttattttttcctacttatctcgatcacttacatattgttattatcccctgaaacatgttttctagagcggtgaaaagctgtccatagcaatcgtacatcccaagatcaacctttctgagataggccgcaccatccaacgccactttcacgtatttccgcctcactgttttccnctgtgtcgctaccggcggccagcccaccaactggtcactaaaaccacaataaattaagaagatcaatcaaacatgcatatgacctatatgaacgataaatgaaattaata

SEQ ID NO: 51348 - DNA, 471 bp, Arabidopsis thaliana
tgaaaatatagtataacacattaacttatgtttgaagatttaagtatatgtggagccaactccaagtctccaacacaaaccgaacttacactaaattaaacaaaaaacgattacaaaccaagctaacctagtggtagtatcctaaagaatcatatataaaaactcaagtggacaaacaacaagaaagaacaatttgcatcatgtgtatatactttggccatagagaaacgcttagagactagagttagtgtaagatcaaacgttaatagtgtccgtaatggtacgatggactcttagccgatgagctaataggatatctttcaaacactactaacgcctctttcatggtcggtctattttgtggaatttgagatgcacaactatatcccaatttgaaaaggccaagtaaaaagtcctctttgccttccaattcggagcggatcgtacatcagccattattagcgcccggtc

SEQ ID NO: 51349 - DNA, 538 bp, Arabidopsis thaliana
taaatagaggaaaatatggagatcactattggagatgccctaagctgaattactattggtcctctagaagttgttttgaggaaatgtcttctgaaaagcaggctttggagtgtagtttgaggaactctggttccctgtaaacctgttgtcactgaagttgtcatgtgtttgtccaaacttcttgtagccctaaccatctatgtagaagactccctcttcagactcagattcgggctcaatagtctcatccttagctgcaaagtggacatgcttcttccctgtaagcaagttatgaactgaatctaacttagcattcacctctgccatctgattgcctgaaacagctccaacaatcttcttcctctcaaagtcagcatttttggtgctattactgcaagtgagattttctatcagagcggtacatcagctggatatctcgtgttgaagttccattgctcgctgcatctagagccaactggtatcccaatcaactcctatgaaacaggtacaagaagttgtactcactgaaccatgatgc

SEQ ID NO: 51350 - DNA, 706 bp, Arabidopsis thaliana
cgccattcttccagtagcttcccgaaatcgtacatctcttcctcgtttctcgggtactcccagtctaggtcgaggccatggaagccgtacgacctagcaacggtgattgtcgattgaatgaacgatgccctggagtcggggttacttgccatggatgcgaacgcgtctttgtcagcattaccgccacctattgacaagagtgttttaacgtgaggatttctctgttggacagtctctgtaaaagcgtggaatggtgcttggttccatgtggcgatagtgatttcgtatgactcagcttcgagatcggcaaatgtacagaagaggtgagtgaaaagggatgagtcgatgtccgtggccggaaagtcagtagccgggaaccagtatgaagctttgacgacgtcggactcagacattttttggtcgagagtcttttaaaagaatgctttgttgtgctttgtagtaataaactgaggatgggttcgttatctatttatagaggatttagggcaaagatatttttagtttctgaacataaacaaactcaacattgaatttataatttcgacaaacgaaaatgtctctggtgaagatgtgagtgggacccacaaacaagctcgtttagattaaaattgaaacattctgttcacatattcaaagatacgtccaaagtggatatttctatagatacctattcacaagaaaatgg

SEQ ID NO: 51351 - DNA, 461 bp, Arabidopsis thaliana columbia
gaagaatgcacatcaatgcatttttgtgcatcaatacacacacataactatcataaaattagaaaatttgccttaggttaaagttttgtgagctagtactcaagtcaaaccaagcaagattatatcaaatctaattctcaatgcagattcacagaaatttcactccaaggacatggaaacgagtcacgaaaagaaaatgatcgatgttataagtatctcaagagcgtgtttgtaacgccgagttcactcatttggaaatgagatgatgactttatacatgtataagaaaaatattttatatttccgatggatttgcgagggtaaaagtttcactgttggaaaagcatcgggcaccaaactttaccctctaaaacgaaaaaattatgcggcgattttttcttttttccaaatcagttttacgcatatttttttcaaaacgaaacccttaaatatctcttaat

SEQ ID NO: 51352 - DNA, 438 bp, Arabidopsis thaliana columbia
gaggatcgatcccctgatttatctaacttggatgagaaaaagactataattttgatatgtgttcacaaaaagaaaaaatactttgaaattttgtaatcaaattgaaaatctctttatttatggggagatttgcaaaactgcccttattctaataaccttttgcaaaaatgccctttcctaaaggccatttttaaaactactatttctaatgtggcaaatgacggtcttacccttactgaataattaggtttcacattcattttgacaaacttcttcgttttggccgacgattttttctctccgataaaactcaaaatcgccgacaaatttttctctccgagaaacctcaaaatcgccgacgaattgttttctccgagaaatctcaaaatcgccgacgaattgttctctccgagaaacctcaaattcgccgacgaatag

SEQ ID NO: 51353 - DNA, 332 bp, Arabidopsis thaliana columbia
ggagccgaggatcaagaggtgggggcaggtcctccttccaaggtccgactcggtctcaggaggtgagacagtcttccaattctggtgggggtctgcgggaagcaggcctttccactggtcttacactcaagaccgtgatcatccgatcgttgaggacgaggctgggttggcgaacctgcttcgccacatcaaagggaggaactgccaaatgcgcggagtgaagaacatggctgaggcggcggctatgctgacatgatggtgaaggagggccaggtaatacttgatgactgcctccttctaattccattcttatgtcagctctaacctttggc

SEQ ID NO: 51354 - DNA, 613 bp, Arabidopsis thaliana columbia
  unsure (1)..(613): unsure at all n locations
gggaccgttttgaccagatggggaatttttgggaagctaatagttattcttccgtttgcatccgaggcagttttatgagcgttctaacagtttatatactttttgttacataacgcactatcaagttcctcgagacgattccagactcttttgtttcgaactttcacgcattatcggctaggaagtgtgactggttgaagcatttctcccgggatcggatcgagcgagcgctttgtctagtctacggtgttccttgcccttccagctcggagtcctcggatcatcgcacccagttcttcgtagacatgcagtcgaccaagctcaccctgagggaggtttatgcgaagaagaaggaagacaaagagaggcgtttggcggagagaaacgtcttgccgaagcgggtcggctcccgaggcgacccaagacggggaagtcttccagatgcaattacgccggttgagacggtgcctaatgaagctcaagaagccgatccgccttcagttgcgcatggcncgaggcggntcgttgcgctgccagcgagcgataaagcggtgggtaaatgtgtntgggtggacgatgcatcgtctaaaaagaaaagagacaagaagaagaa

SEQ ID NO: 51355 - DNA, 757 bp, Arabidopsis thaliana
caatcatcacttgctatctccgatcccttggagccatcaacattagaatgtaagtcgccttttcttggcaccccagtgagtcagtccagttcagtacatcgactaaaaccgggaatgcgcgcacaccaaacctattgcttttcttccttcagggactgccactaaattgctcaagatagcgagaatcctctcactcacttccatatctcccaatgtgttcaaaagatacgtgatcaaatcggtttcaaggataaacgaaacgtttggttgatagattgagaggttgtagagagctctcaatgcgtcctctctcgcttgtgagctacttgtttcatccaaattctgaagagttttcaccaggaagattatagctccagaagaaccaataatcggtttgtttgaatctaaagcgcttaatccaagaaaattagcgaccacagcttctgcaatctcttgatcaggagtgtttggagactcaattagcttcagcattttgtgaacagcacctgctttaacaatcgctgctttgttcctgcaaaacagaatcaaggaaagtcctaaaatgggtaaaatattgaaataaatgcttcaagttatacacattgttccatacttcatactcactctagcagaaaaaaaaaaagacatggaaagtgacttaacgaatgaacccaaaacaaacacagaaactatttggccgaaataaaaattcatggcaatgaaagtgagacttacgcgtcattaccaatccaagatt

SEQ ID NO: 51356 - DNA, 735 bp, Arabidopsis thaliana
gtgtgtatctgcacaaaaactgaagactagagcttgtccattgaagtggacgtgaacctgtacagagtaaacagaggagcctcttgatgaccatgagtgtctttctcgaacaaaagtttactttctggtagtgatctggagcagtgggatttaaggaaccagcttgttgattctttcaggttggaccaagtctctgcaattgctgattatctcttctagtagttcatcaaggattatgtcacctgtctcagaaacgatgcaaccaatatcaaagcggagatccatccagtttccagtcctagccaggtctttccgcactatctggtctagtgtgtgaggagatggcaaaggtaagagatgccagtaaacttcttcttgtaccacttcaacagcattttccatgtctggaaaaaagtgcattgcaggtttgacgaatgaaatccaagggccatgtccacaaaactccataagaacttcattgatacagtcacaaaggagtttcttatcgctgcagagatttgtcgaacagagatctacgtcatccattagagcctgctcaagaatcatctccgaataagaagatctcgccaaaagctcttcccagttcaactctgatgattgcaacacggcttgaatgctaatcaagtgccagttccttgtcgtccattcacgttttgacatcatggtcgttctccggtcctggaaaatcacgttcgtcgaatcttatgaacagtg

SEQ ID NO: 51357 - DNA, 952 bp, Arabidopsis thaliana
gatttaatcgtatcaccttccaaatcctgtggccattacgattctcactgagccatgattcgggacacatggaactggcaccagagcagtagattataattggcataaaagttcctaccttaaatgaagataacttaattgaaaacataggagcactcaaacacacgttccataagcagaaacactaataggacatacctggatgatgccagaacttttcgttggtcacttctcgtagaagacgctccacagacgtatcttggtattgggtactatttgttgcttgcttcttgaacgaagtaaatttcttgttaccaaacttggagtcggcagaggtttgactgcacaagggaacttgtctatttgacgaatgaccactcttcagctgccgtgaatttattggctgcttccatgaaccctgccttgacacagatgtcgatgtcgcctcagcagaaggtcctgcctccccattcatcctcctagttttaccagcggacgcggattgtgattcaccattagattctaacttaggttcagatgtttctggatgtataccaccattaggaatgtcaattggtttctgatcccggtatacaacatgccctggaaccccgcctgcttgctcagcagttggagggcctgcacgagattctctaactgtgcgtgtgacgacaggttgtgggaaattctgtcttctaggtgttgttgtcttaataggaccagcttgcctgacatcgtccaggttgagaaacatggtctgcctgtggcgtttctttcccaacattgtctctttctgatgatccatctttcttttgacagtagtatttgcgcatttgattgcatgacttgcttcaactcctttagtttctctcggcctcaccgttaaaccctgttcttgaggactatctatagaccactatctttacactactttctgaaatatgattgacgt

SEQ ID NO: 51358 - DNA, 675 bp, Arabidopsis thaliana columbia
  unsure (1)..(675): unsure at all n locations
cgtccactttgggttcattcttgacgcgctttcaaaggttgttgtcctcttcttcatcatcctcttcgctgtcagacaggaccacctcgaccggagtattcacaagccccgaaacttgacctcaggcgcagaggtacatccggagcatagtcgggatctttgcgacagagtcgaagttcctgcactcccattgaaagggatcgctttccaaagccctcaccttcctctccactcgagcgatatgagcctcgagtgtgtgccttgtgagacccaagcgttgcctctcatcgcacatacggtgatgtttgtcgacaacctggcattgaaacaaacgaatatgacgaaaaaataagaagtatggttgaggaaagaaaaacggataccgaccttgtccatgaagtcatacgcctccttcttgtctttcggagggaagtagaatgcggcatgtggaaagaagacgccggccggttcgaaaccatcgccggacaagaacagcagactgcttgggtcgagagggcaaacggtggatgcgccttcgtttccatcttcgtagtacgctcaagtagatttcagaatcatgtttggagagagtcattggcagataagtccgtatttatatagatttagggtttatcttggaccanaatgtaataatgatggcgtgccgaatggttt

SEQ ID NO: 51359 - DNA, 475 bp, Arabidopsis thaliana columbia
ctaaagcatgcattgttattaagcttgattagttcacatagtatataaaccagagcccttctatgagcatacctgttctttcttaaatgcctaggctcatcaatgatagttctaataacaagtacctataacgggcatacctattatctaatatcaagttctaggggatcaatctaaaactagcaataagaataatcaagatgaagaactctaagaataatcctaatgggttttcgatttactaatccatctaaatccctattgagactccttaaacccaacaaggtaattactgagacatgataatagaaacacaaatcataatctgaatagtttgcattgatgaattaagaatagatgtaaaggagttaagaatcctctctaaaaggattggattcttctctcaacatgtgtaacaatctctaaaacaaaacttaggtctcccaatgaccgaacaattaggtatatgatatga

SEQ ID NO: 51360 - DNA, 581 bp, Arabidopsis thaliana columbia
taaaaagtgttttagagtgtaatattctcattaattaaataatagagtttgttactaccatttgtgtcaatcctccaaataaaaatgagagcaaacactattttaatattaacttgaatcaaaaacttttttaaatagtggaaatatatatcctaaattggaaatagagaactcaaatataatagcacaaactaattttaaaataaaaaatcacttttaaatggtgaaaatatataccctaagttggaaattgggaaccaaatataataccataaactaatattaaaataaatcaaaatttcttttaaatgtttgaaatatataccctaaattggaaatagagaacccaaatataatattttaaatttatatctaatttataccaggttgctaattttcatataaaattgtggtattattgaaaaaaaaattagtgataatacttttagaacaaaaaacttcatattaaatcaagtagtgctaattttggaagtttatggagtgtgtgctattattgtccgtaaaccttgttttagtgctatttttaggaattctctaatacttttctttcacaatatata

SEQ ID NO: 51361 - DNA, 529 bp, Arabidopsis thaliana
ggatgtttcactaatatctaaactctgtacaataggaagctgggggttggaaggatagactgtgctattcacttgaacagaagatagcaacccagcaaagtaccctctttccactatcgtaacgggtttggcgacaggctgtagaatacctggagatgatgattctccagcttccaaacacttagcaacggttgtgccagtgattatagctttaggagtagggccgactataacagaatcgccttctctaaaacacgcaaacaaattgacagatttatcagcaagacttaaggatttaaagcacctaaagtgccaatcagacccaatcatcgtcggatccggctgaacaccagctaaaagagctatttggtcctcgaatatgtagctaagctcgagagatatggacgaattctccattccaaaaagatgtcgcacttgaagttccaaatcccttaaattttttaccccatcaacctcatcgccctcccgtgacgacaagaatccatcttgaactcccattcacctgtgc

SEQ ID NO: 51362 - DNA, 533 bp, Arabidopsis thaliana
tgaagtccaactctaaatactaaaacttccacaaagtacaaataacttgagtaccggacaactgaataacttatggcacaattatggctaatgcgcagtcttttgtctgggcccgcattccacttttattaccataataactcttgtgtgttcacactatgtgttcacactatgtatttcaaatttcaattcaaagaaaggaatctttctcattaaattacatttctttctctctctttctttccttcttctcctttcttctctcgaaaagttatcttctctcattctctcttctctgccgattctcgaagaacagtgctgacgaacaacacgacgaacctccgccgacgccggccaccgaatctttcacatcagccgccggatccaagttctctggtaagtttcgggttggattgaaatgaaattagggttttgatttcccccaatttcattgaattatggtttgcaaaggaattagagttgccatttatgatagtttgatatctaggggttggattttggattttgttaag

SEQ ID NO: 51363 - DNA, 584 bp, Arabidopsis thaliana
gggctaatctgtataagatctatacttaaagaggaatcaatacttgatcaaagagcttgttggtagagaaactctttttctttttgttactgtccaacatatttagattatacagaaaacttcagaatctttgtattctgctttcatgtgttgtcgaaaaaccgagaattttacttgtatcaaatgcaatttacgtaaaataaaattttgacatttctatccaataacagatctctattcactattttttttatttggtaaaaaaatccatgttcagtcaaaggaaacaagtacacaagtgaaagaaaaaagaatagtaaaagagtagttgtttactgaagtaacaactgccagctctgtctcaaaacggtttgttgttctgattgttgggtttggaggaagaagatgatgatgtcctggtttttgcaaaatccatcaggtctttaaaaaggatatcctctggtttatcatctttctttggtggagtaacaggagcagcagaggctgttggattaagagagagattccgggattgtcccaaaagatcatcgtatgaagattcagaggcactgcttgagtgttgt

SEQ ID NO: 51364 - DNA, 624 bp, Arabidopsis thaliana
acacaagtctctctatggactaaaacagtccccacgagcatagtttgacaaattcagtaacttcttactctcttttggttttgtatgcagtttttcagatccatctctctttgtctgcgtaaagaactcggatgttatcatgttgcttctcaacgttgatgatatggtcatcactggggacagctcaaagctactgtcaaatctcctcaacgaactcaacaaacaattcaagatgaaagatctaggcaaactcaactattttttgggaattcaggctcaatttcatcaaaagggtctcttcttatctgaaccaaaatatgctgaagatctccttttcacagctggcatgaaagactgtgctccagtggcaacaccattaccaattcagccagacaatgctcctcatcagtcacaactctttgataatccaacatattttcgcagtctcgcgggaaaattgcagtatctgacactcacaaggccagacattcaattctctgtgaactatgtctgtcagaagatgcacgctcctacgctatcagatttccacctactgaaacgcattttaagatatatcaaaggtaccactacaatgggaatttctttcaacaaaaacacagactg

SEQ ID NO: 51365 - DNA, 722 bp, Arabidopsis thaliana
aattggagtagccattggtcctttcaaaccaaccttgtttttaagcacagattgaagattatcccatgtcaagaaactattggttctaggatctacttcagtaccaacaaactgttcgtcccaatcaataaccacatcagcggcagtaaacacctggatcagcataaagggaaaacattttcagaaccatcagctataaactaaaaaaaacaaactttatgattcaaatctctcccttgacacgtctcaaaaagtattcagacattatggttcctaagagtatccagaatctataacaaaatttatatggtaacataaattacacaacaccaaagtagattgaaaaaagggacctgcttgacagattcagcgatttcgggaccgatcccatcaccgggaaagagagtagctttgatcggagtggaggaggagaagaaagccctagaaacggaaatgaacggaccggagctagaactcgaagtcccgagaatctggctcgatccgttaccgataagccgtctcgcgagaaatgctgtcatggtcatcgcttccagcctcagaaggacgcagagagagaaagagaggaaagaggagactttttgctgcgttggacctgaaaaagtttacttttataccttctctagctccagcagagaagcagagaacatttcgatttccatgaaataaaacggcacaaagttagtgtctgaaaataagaaacg

SEQ ID NO: 51366 - DNA, 931 bp, Arabidopsis thaliana
gtctgctcatttgttatatggtttggaaacttgtattcagcttcttcaatgatcgtggctactcgtctcaggggaagatggtggaagcgaaaaggttatttgattctttatctgaaaagaatctagtggtctggactgcaatgtttttgggatatcttaatttacgtcaacctgattctgtgcttgagcttgctcgtgcgtttatagccaatgagactaatactcctgattctttggtcatggtcagcgtccttggtgcatgctctttacaagcttatatggaaccggggaaggagattcacggtcacagcttgagaacaggcattttaatggataaaaaacttgttactgcatttgctgacatgtattcaaaattgtggaaatgttgagtatgctgaaaggatctttgacagtagcttcgagagagacacagttatgtacaacgcaatgatagctggttgtgctcatcatggtcatgaagccaaatctttccagcactttgaagacatgactgagggtggattcaagccagatgaaatcacgtttatggccctcctatcagcttgtcgtcaccgcggcttagttctagaaggtgagaaatacttcaagtcgatgatagaggcttacaacatatctcccgagactggtcactatacctgcatgatagatttgtatggaaaggcctataggttagacaaagccatagagcttatggaaggtattgatcaagttgaaaaagatgccgttattcttggagcatttttaaatgcttgtagctggaataagaatacagagcttgtgaaggaagtcgaagagaaattgttagtcattgaaggatctaacgggtctcgctatattcaaatagctaacgcttatgcctcctctggtagatgggatgagatgcacggatacggcacaaatgagagggaag

SEQ ID NO: 51367 - DNA, 961 bp, Arabidopsis thaliana
gactctagacctaccttttaatcttttattcaggttcctgattgcattaataagcttgctcaagcaggaataaagatttgggttttgactggagacaagatggagactgccatcaatattgggtattgatttcttggaacaacctgattatttttactcttgacccttgtgcatgcaatcttagtcactctctaaacccacctatgtatgcatatctttcacagcttcgcttgtagtttgctcagacgagacatgaagcagataataattaacttggagactcctgaaatccagcagttggaaaaatccggagagaaagatgccattgcagcggtaatacaaattttctagaacactgatattactagtaatagtataagtgatcatgtagtagtgttactagtgattatgtagctgaacgaattccatttgactattttttgcaggctttaaaggaaaatgtactgcatcagataactagtggaaaggctcaactgaaagcgtctggtggaaacgctaaggcttttgctttaatcattgatgggaaatcacttgcttatgcattggaggaagatatgaaaggcatcttccttgagctggccattggttgtgcttcagtgatttgctgccgttcatcaccaaaacagaaggcactggtcagttcttactttatcttattatcttccatcataactgtcatctacttagaggctacctagctttttctcaatactcatattgcataggtaacaagactagtcaaaactggaagtggtcagacgacactggcaattggcgatggcgcaaatgatgttggaatgcttcaggaagcagatataggagttgggatcagtggcgtggaaggaatgcaggttcgacaaaagaattacaaaacaaccatttcgtctattgttgttgagattttcgcttgatgaatcctaataattttccaggctgtaat

SEQ ID NO: 51368 - DNA, 1410 bp, Arabidopsis thaliana
taacctgagccttctctagctgtcggaaaatgacgatttcgtctattcggttcaacaactctggacggaaatagttcttgagttcttcgactaccaaagctttcattccggtataagatgctgcctcttcatcatcatcgaggataaaccctattgaaccatgtcttccctttgcaatggccaatgatccgacattagaggtcattatgatcaatgcgttcttaaaagatactctccttccctgtaaacaaagattgaagaagcaagcaaacatatcaattatatgcacagacgagtttcaactctataggtctcttgaagaagcagtaaatgtttttaagtgaatacaggacatcgaacctgtgaatcagttagatggccatcttcgaacagctggagaagaatattgaagatatccggatgtgctttctctatttcatcgaacaaaaccactgtaaaaggacgtctcctgatagcttctgtaagcattccaccttcttcaaagccaacataaccaggaggagagcctatcagcttgctcacagtatgacgctccatgtattcactcatgtccaatctcagcatggattcttcctgcaataaccaatgaaaaacgggggatgaaggaatcggttcaatgaccacaatcatttatcagcactatattgttaatgaagctgtaccgagccaaaataatttgctgccagagcttttgtaagctccgtttttccaacccctgttggtccacagaaaagcatagcagcaattggacggtcgggatcttttaagccaacccgggacctcttcacagctctagatatggcagctaccgcctcatcttgaccaacaactctgcctctaagctgatcttctagactcataagaagcattctttcatctgcagtgatctgctgaactggaattccagaccaaaccgatgcaacggctgcaatatcatcaggtcccaccagtataggcctgaaagcacaatcaaattaaagttatggaggttccttcatgttgttcttagaacttttttgaaagtttccccttaaagacctaaatatgtaaaagaaggaagtcatactcatcgtcgcctgctgcaggtggcaaagaagactcttcaactagttcaccagactcatctgaaatggcatcaccgtcatcctgcttttgcctgcttgagagaacctatgtacagaacaattattgaaactgttaataggtaaaaatgatcaacatgcaagaacactgcaggactaatgtctagtttctttaccattcgtgcatggcctgaactgttttgatctcttgccagtaatcattaggtggcttcgataggatacagattgcatcctcctttttcttcctaaaagcttcaatacgagctctgcttcctgcctcgtcaat

SEQ ID NO: 51369 - DNA, 798 bp, Arabidopsis thaliana
gatacacaccatatattaaaatagttttcagtcatatattgtgacaagcatgatgatatatgttctcatattttgtcttcatcctccaacaacttcggtggctccaagagcaagaaaaatgagcttctccatacgcaatgtcatctctatgagactcttcgaagtcacgtcttcgtttttcccgatcacctccttcactcgctttgtttcgtcgaaacaaatcatagcatcatagttggcggtgtctggagataccttgagctctgaagcagcactcttgagagacattactatgcgaaggaaggaatcttggcactccttgaactgttccttcagagccggtatcttttctattgctctatctgcagatttcaccaacaacttggcatagggtaagtcaatgcccctgatcacgacttccgcaagtgggagctgtagattaaaagattatcatttttaaactgcaatgtgttattggtaaatatttaatactaagaacgagtcacaaatataattggaatagtatatctattttgtttgttaagctgtgaaaattgtttccacaactttttaacaattcacgactatatatcattcaaaattttgtttttgcaagaccctatgcacatatctaaatatagatgataaataaaacataagttcaaaaatttaatcaacaacccttacatgttaacatatgataaaacataattagaatatgcaatttaaaaactaatttaaggtggatatgtgggtttgatattattacaagccagtggcgaacggcaagaggattgg

SEQ ID NO: 51370 - DNA, 545 bp, Arabidopsis thaliana columbia
gatagtttgagatgaacctgagcaagcaatccggagtaaatttgcgggcgaaaaagtaggagagagcttctcgatttgctggacttcttcggactggttctctgacattacgaaggaagctgaagaagagcgagaaaaaatcgaagcagatgagtaatatattcagatagttcaatagaggaaaagagaagctaatgtacacatgtaatcacatctctgtaacacaggaaaaaggcgggagaaagaagataaagagcgtacatggtgttcttttggaagaagaagactgtagaaagattgagaagtgtttttcttttctcacgaccttccttagcttgaagaagaagaccgtgagcttaatctattgtccttgacaaaaatcttataaaacgacgccggttcatgtatatgaaactttagaaatgccactgaacttgacgtttcttcaaaatttcaccccgatgtttgtttttggaggaaaatacctgttcgaattcttcaccttgacatcagttatcgatttggacaggaaattaatgactact

SEQ ID NO: 51371 - DNA, 917 bp, Arabidopsis thaliana
atagttggaaaatatgtaaatgcaactgtgaaattgaccagaaggatgaagatgatgaagagaatgctacaggttgtatataatttgtacttaaatctttgatcaccctccatttcgtaacaattaaaaaaaaacaaaaaaaatcctaaaatcttgttcatattgaataagagatgagaagaaacaaattaatgttgctaaaagaaaacaaaggacatataaactagactttgtcaattgaaactaaccaactctcgctttctccttttgccacctcctcttgattgattcgtttaccatgtagatcatatcaatgccttttataatcgctctgttctttcgttttgcctcctttatgttgcttgatttgcactacacttggaacataagggcacacaagtggccaacagtttttgtctgccggttttccaagccccaatttccacaagcatctagcctctccattaatgatgtcaatactgtcgtgcgttaggtcgcctttagtgtctctttctttattagaaaccacaacaattttattttcctcgtcaatgaagaaagtctttaatgaaagaatttcgtgaaggtatggtgtatccattgtgaagaatttgctccacgtcgcattgttgacatcaatcttagtcgtaatccatagctcaagcttatatgctcggcaattctgaaataaagcagtgattttatcttctctaaccgaagatagtgacgcaaactgtgcaccccaagcactaaatggcagaggtagaagcggtccaaatctctctcttgtaaaatcaaaacagattatatgatcaatggatccgtatgcgtgccgttctttagcgccccagtaagtgttcccttgagagaaaggcacgttcagacattataaaccagtgtggagcacatcaagagta

SEQ ID NO: 51372 - DNA, 963 bp, Arabidopsis thaliana
ccattggattcaccacgtcttcttcaacaaacaatataacaaaacaatgcagccgaaaggagtacagtatccttttcatggcagatttgtataatccaagttgattcttatcattcttgatcagtctaaaaaacacttcaagtgcttttctttagcccttcactaataaaccagagtttgatgattaagctataaaatccaattactgtgtaaccaccttagccaatgttctacttataaaaacatttttcatttttgatggctttagatcaaaactatcaatctcggtttagttcctagaccaaaacacatagacacaccacaattatgaaagtcagtaacaaagtagaggctttgggaaaaaaccttacctgcataacttaatctctgaaaatcacagaatctgcaatggccaaaagcggcttcaagcaatccggagtaaatttgcgggcgaaaaagtaggagctagagtgattcgatcgccggagtctctggatcaactctggcacaacttcctttggtttgtaagtataaggatgtcctttcacagtcccagtccagttaactcgcgtcaacgtatacccagtgcaaccatccggatccttcatgttcaacagcgtcgggaaataatgctcctccgggtaacactcatcagaacgataacacgggagcttgaatttacgccacaagatccgatctttgattgttaacaaagcatgtcttctagtcataacaaagaactgcgaaccaactctgaatttctcaaacggaacctcaggcatcatagcataccttcctctagcagtgtaccgtttccaaagcctaggctcatcagatatcagttccataaaactccgatacaagattctaatacctctcggattcggattcggatccggatcagatttatcagaaattgaagattcaaagagagagctataacatagttgaacgagtggagag

SEQ ID NO: 51373 - DNA, 335 bp, Arabidopsis thaliana columbia
caattaacccatcaagttttataaattgaattaaaccaactaaaatctttaaaccaatgtcaatctaagtttaaccaacacatctaaaccaatttaataaaatcatttttttccaaatttcttaaatatacaagcgatgaaattgagaaaaagtatactcgtaatttttccaccaaaaaacataaacccgtaattttcccgccaaaaacgtaaacccatgatttttccgcgaaaaacgtatacccgtgatattcccgccaaaaacgtaaacccgtaatttttccgccagaaacgtaaacccgtaattttcccgtaacaagcataaacccatgatt

SEQ ID NO: 51374 - DNA, 528 bp, Arabidopsis thaliana
gccatctttgattatttcaaaaagcttattcatgaaccatgtccatgattcatctgtctcgctgtccactacagcaaaaactattggaaaaatctggaagttagcatcctggcaactagcggtaaggagacaaccaagaaacttaccaaaaaggtgtgtaccatctactacaacaactctcctaagatattttaaccctttgaaactagcccccaatgataggaaaacatacttgaaacgttcatcacccttatcatccaactctgtttccaaatgataaattgtgccaggattagcaagttgtaagacatgcaaatatacatgcaacaaggagaaagagctctcatacgctccatgagctgtctcgacagccagttctttagctttcccaactttctaatacgttattcgcacatggtgctcactcaacatagaatcaggtaagtctcttgctcttggaccacaaaacgccttcacatacttagcccttaggagtgaagctcaaccttagaagttgcatgttttgag

SEQ ID NO: 51375 - DNA, 450 bp, Arabidopsis thaliana
gggtacgttaaagacgagcgcatggaagcgtacctcaaactagtcaaaaccttgatcaaacagttcgaatagtttgaactgaccaggatccccagagggaagaacacctctgtagacgccttggcaactcttgcctccacgtcagatccttgcgtcaaaagaattatcccagttgaaggaatagaacacccgagcatcgacctaacggtcaaacacgctgggacggaaacctcggcaacttgcgactttacgcgagtaacccgaagcaccaccgccgcggctagagcccttgtagtagccgcgaaggcaaatgcagcggaggaagagccggatgtcggaacccccgaacaacctgcctcgtacgaacctgaaccagtacaacgactagagaatccaatcatcgattacatcgaacgagggatcaacctcccgacaagtgggagccagaaa

SEQ ID NO: 51376 - DNA, 551 bp, Arabidopsis thaliana
aacccttcttcgtaacctccctaaagacctcagaagagatattaaacgccatctttgcctcgatctcctcaagaaagtgagtaacaagctttctctctttttcttccataaactgaactaaagaaccctcagaatccaaattatatgatgtttatggtaggtacctttgtttgagataatggatgagcagttacttgacgcggtttgcgataggctaagacctgtgctctacaccgagaacagttacgtgatccgtgaaggagatcctgttggggaaatgttgtttgttatgagaggaagactggtaagtgccaccactaatggaggaagaagtgggttcttcaatgccgtgaacctaaaggcaagtgatttctgcggagaagatcttctcccgtgggcattagatcctcaatcttcttctcactttcccatctcgacaagaacagttcaagctctcactgaagtcgaagcctttgctctcacagctgaggatctcaagtctgtcgcttcacaattcagacgcctccatagcaagcaactccaacatactt

SEQ ID NO: 51377 - DNA, 647 bp, Arabidopsis thaliana
ccctattctggatatcgttgttttgtagatggatcttggaaagataccgacaagttttcaggcttaggatggtactgtacatcatcaactggagagacatcaactttgggagctgccaatctcagaagaagtttatctcctttacatgccgagctggaagctttcctctgggcgatgaagtgtatgattggtgccgacaaccaagatgtagtttttcttacagactgttcagatctggtggagatggtgtcttccccaaccgaatgaccagctttctcatcgtatttggaggagttacagagcgataaggatgagttcacaaacttttctctatctttaatctctcgtagtactaatgttaaagcagattttttggcacgaaaagttcgtacccaaccgcttcatattacatttgtaaacaacattcttcaggattgactcgtttgagtcctaattaattttcggatgacaaagaaaaaaaaaaaacccaaattattaattccacagagcaagaccaatcttaagatacatttacagccgttggatccaactagtaatcatcaggggccgtagtccgtagattaattactacgcggtttttgcacatatgctttcgtcaattgatgggtcccatgtcagaggtatgt

SEQ ID NO: 51378 - DNA, 464 bp, Arabidopsis thaliana
gtggattaactttggaggtttcgcagatgggtaagagcagcaaaacgggaaagagtaagaaggacaagggcattgtcgaggagactttggttgaggaggaaacaatgatcaacgagaaaactagaatcgggacgatgctcgatgggacagactcagctgaacctgagaccgggaagaagtccataaatgaggaagcatcggagagtagcggtgcaagggacagcacatataaccggaacaatactccaacgacccaagaagagtgggatttgatgaagggattgatggcgcaactagccacattaaccaaggccgttgtagcggatccagtggtccaaagagtggataaccaaaatgacgatgactcggaagttgtggaagtgaatctgcaaccgaatcatgggcggaccacgggagactatctgacgcttctcgcacatgtctcacggctgggcacgagacac

SEQ ID NO: 51379 - DNA, 604 bp, Arabidopsis thaliana columbia
tagtaacgtccgccagtgtgctctaaagtgaattctcggttcttgcgaaccttagaaacgctgttttgccgatggagcgtacgctgttgagtatggcatcgacctgattcaccttactagggttgtacaaatttcatgtcaagccttgaatgtcgacctgtgtaatacaaagataacggaacaaaacctgcatggttacgagcccgtcttatgttggatgacgttcaggcagactatcggttatttatgttgaccaattggaccgttttgtagccttgtgtagccctgcgtctttggtggcgataaggttggcttggccggtgattggtggtcgtaaagtcagctggatgcggattttgcgctaagcaggctttagatttctcattcagcgctagtccctttatggtctcttggcctgtattgtcatcggcttgtattgtgtaacatgacattacatgatatgagtacatagatggtagcttcaacaattgttgtcaagctaaagcagtttgagcatcaagaattaatagtatgtcagctaggatatcagagtcctagagagctgaatcattatgattaatcatggtgaataagtgaaaatgag

SEQ ID NO: 51380 - DNA, 500 bp, Arabidopsis thaliana columbia
taggttcggctctgatactacttgtaataccacttgtaacaacccaaccgcccttaccagtgagccccacatcctctctcgggcccatagccacccctatccgacgatcggtgagtcacgtccggaaagctttaaagacttgttaccgaccctacaaatcaccacatgatctttcaccatgttttgtcttcacttgcatcgttccgacaatcattttccggaaggtcacccatccgaaaaattactccaacccaagaacgcttaactttggagttctctcacgacctttgactaaaaagataattgcactttggtgacataggtggccaaattatttattttaaacctctttgcatagactaccatattcttgaaatctgtgtgttacaattcaccctcaataatagatcgcaacgagttgcacaccaagatcgttaccccaatggtgcaatctttcttgactccaacacacatctgagtttggctctgataccacttgt

SEQ ID NO: 51381 - DNA, 545 bp, Arabidopsis thaliana columbia
gattactctctataattttattttgatataactttataacatactgtgtggatttagaaccccgagagttggcccatttttgctttgagtttcattaggttttattacgcccacaactcttttcttctttttgttcgttcaatttcactttgtaatatttgttatgctaacaatcttgttcctgtttgaagttccagaaatttgatattttttcatgtaagcatactactgggagcctaaaattaaacactaatagtggaaatttcattctacaagaaataacaaacattatcacctgcgtagaagcaaaaagtccgtgctttataaaaggaacaaaaaattagaccaattcaacaatcattgatagtggcatatatttgttcatataaaattcaacgatctcatatatatagtgacactgaagatagggtgaacgagtcgttattatacacataagtcaacggccaatattaattagtcaactcatattgaatatcctctctgctaatattaaatggcaacgaagtcgtctttgattttttttt

SEQ ID NO: 51382 - DNA, 514 bp, Arabidopsis thaliana columbia
ttttgggcttctaaatgttgaagcctaaacccagtaataatttatgaccaagatgcgactatgttccgactagttttgatttgttgggctttgaaattttgaagcccaaacccagtataattggcgacaaaattgcgactattcaacgatacttatttgattagttgggcttcaaaatttcgaggcccaaacccaaatgaatatgcgacaattatgcgactattatgcgacttctattgtgttgaaaaccctaaatcgagtcatttctcttcgagccaaacacttagccatttcttcgatccaacttcctcttcttcttcttcttcgtctcggaaaccctaatacccaattctctttgttcttcatctctcaaaccctaatccctagttcttattctcgctcttcttcattcctcaaaaccctaatcccaattctcgatctgcttcctctctcaaaccctaatcccaattctgtttgttcttcatctctcaaacccgtaatcccaaaatctcga

SEQ ID NO: 51383 - DNA, 864 bp, Arabidopsis thaliana
caccaactcgaatttactcgaatttcttgaaattcttagataaagccttgacaactttaagatatgttcccatccttgaatctttggtttcatagtatccattgaactggttaactactagttgtgagtcataataagcgattacttcctcagctccgattccttgtgccagccaaagtccggtaatcaaggcctcattctccgcttcattattagaggcagtgaagagtaggtggaatgactgttcgaggatctccgatgtgggcgattccaatttaatcctattccagatccttgctttgacacggatccatccacatgtaacttccaagtttgattctcccattgttttggcgcgtcgagcatcggtaacccggtcaagaaatcagctaatacttgtgccttcatgcttacccgacttttgagttctatatcatattcactgagctctacggcccacttcgctaatcacccggactggttgggactgtgaagtatcgctcgaagttggctggttggtcaatactttaatcagatgagattggaaatatggacacaaattttgtgctgaagtaaccactactagtacaagtttttccatcattgcttatgtaacaatgtttttgtccacctcgggcttagatactaccggcggggtagtcaagtatgcattaactttagccgcgagcaaaatctggccatcccgtggaaccaagttgaccgcccgaaatagcgccgtttgacctgagaggtgcctttaacgccatgtggacacctactctatggtgccgtgcggctaaagtactagtcttgaaccgaggtcggtgagtcttggaccaaagctgatggggcggtggagtgaca

SEQ ID NO: 51384 - DNA, 445 bp, Arabidopsis thaliana columbia
cgtcatcactttacatgtttaggatagatttgcatgcaatgtaagagttccatattttatactagttaatacttactaaaatgtaaaatttacaaatttcacggatgttttatatgtatgtaaatttttgtgttgataaatgacgatatactatatataaatatatgccccaatggttgaccaagggtttattaatgcttctacaccaagaggtcggggttcgagtctcagctactgcgatttattagcagatttgcagattaatggaggcaagtgtgcaaaagatctacaacgatgtacaattatagccgttcacctaggattctacgcagagaagatattgaaggtgtccatcaagcgcatggagaaggagaatgatgtgtcgtctgccatagatctaataagggtcggaaggaattatctgtggtagaatcgtctatgtaac

SEQ ID NO: 51385 - DNA, 646 bp, Arabidopsis thaliana columbia
gactctagcctgttgttctttgagaatctcacaaagactcgttctttgaagaaacccttaaaacaatttctattgtgcgagttttgactctcacaacctttggatgatgaagaagctgaagcagaggaaggcttgcagatactctcactaggcactatgtaagaaaactcgaggggtaaatccattaagatgcgtggatacattaggagcacaagcgtggtaatactgatagattttggggccacgagttgcttcattcacgaaggcatagtgaaacacaaaggttggcgagtcacagaaaccagaggctttggagtaaaggttggtggaggtagagtaataagaggaagcggtaaatgtgcagacatagcactggaagttcaaggcatcgaatttatagaggatttcttgctttttgatttgggggatttagatgtggtgttgggattttcttggctggccaggttaggagacacaagagcaaaatggggacaactcagactaagctggcagattggtaacacatgggttacccttcatggtgatcccgaattatgcagagaacaggtctctctgagagccatggaaagggtgattaaatacactggagcagcttacttgctggagttatctactttatttgatc

SEQ ID NO: 51386 - DNA, 534 bp, Arabidopsis thaliana columbia
tttctagagacaaaacgattttgttttgtctctgcaataaaggacgttgttttgttctaacagagcagataaacgggacattaacgactatatttttttgtcaacctatttaacgacatgactcaaatgacaagtcaacaaaaactttgtcatttatttagaaagtcaacaaaaactttacgatttatttgttttccgtgtagttcaagattaaatcgtcccaaatttgaaagttcatgatttttttgacattacaagacataacattttttccttactttaaacttggtaattccggtccttctgtgaaagattcaagtgtgaattgataaggaatacatggtaacacctataatttaaaccgattaacatttataataaacattgaaagatcaaaactaaatctagactaatcgtataagtacttggatcaattcctgtccatttctgttataaacaaatcagagctcctgagttcaacaacatcttgggcagaatgaacaattcacaacgcctacaatgccacatctttaa

SEQ ID NO: 51387 - DNA, 602 bp, Arabidopsis thaliana
aacgtcgttagtcgctgattagtcgtattatcattttttacgactactatgcgactgtcgtgtaagtcgtttatcacctgttttcttgtagtgatataaagtcaatggaccaatttcaaattttcaagataaactctaatctgttataattaactacatgttgccaaattacatacatattaaaagtatatcaagcatataagattgttggattagtttatcgtccaaagcatcttgacaaaacagaagctcaaacaattatcaacaaaaactctcttcttatttctcaaaaaaagctctcatggcttcttcttcctcggttgtgaaacccaccccaacggggcctcaggtgttcatatgcttccggggagcagatgtccgcaaacacttcataagctttcttgtccctgccttgagagaagcgaacataaacgtcttcatagatgagaacgagtttttgggctcagaaatggctaacctattgacgaggattgaagagtctgagctcgcgctagtgatattttccgtggatttccacctaatgtcaccacctgtgtgtggcttagagggattagaggacgtgctctcaatgctgtgcttct

SEQ ID NO: 51388 - DNA, 542 bp, Arabidopsis thaliana
ccaccaactctaatcgaagtggaagcggggtttgggaggagaaaaatagattgtcctgctgtggggtgatcgaacctatacttatataggctattcttctactgtgaccaaaaactcttggaattgataaggtgttgcatatcaatccatctcggaggaatagactttgaatgtagaggtacattgcatgctctcagaattggggtcccaactcctcccacaaccattcttcctggtttcttaagtcccttagcccatcctctgtaactcagcaggtgctcgattaggaagaatgagaccgaagtgtctgtctgatctccagctagaactgtgccatctgatgctaaaccaagcagctcttgaagcgctgtctccatcagctctagttctccattgacgaaggttccattcctttctcttgcaaatagcacactagccaaggacctatgaaagtatctaaccaccggactccttatctcgttgctcttggtactagaggatgaaaatccatgcttagacccaagtgtggcccagaatgactg

SEQ ID NO: 51389 - DNA, 540 bp, Arabidopsis thaliana columbia
cagtgtcactgtcatcatcatcagttgttatcaccccctcatcatctccatcaataatgtcatcatctgagaagtactccctctctggcactgactgttagtgcaccctctgtcaggacaaaccagaaggagtgctgattgctggaacaagctggaagctgtttcagaagactaaagtgaagatcaagtaattgatgctcacgtggatataccgccaaatgaacgaatgacgtggagatcacaacaggatgagttcagtttggagaggagatattcacgcgaagatttggagtgatccaagatctcgaaggctaacctagaagaccaaagacctcgatagtataaatagaggtgctaaggttcttgttaggcttggccgtgattgtgagtgaaaagctagtgcaacgcttttcattattagagactaaggtttagtctgattggaattctagagagatcaaagagtgtgttcttgtgatctgctcttgtgtgtttaggaaaatctcaggtgacaagctaaagtagtttagatcttgtgta

SEQ ID NO: 51390 - DNA, 918 bp, Arabidopsis thaliana
tagcaagattgacaatctacgctctcatatatccaatctctcacctacatcagcttctatcaatgcagtcacactacgcagcggaaagcagctcaacccaatacttcaacgcaaacgatcagcttagccttcaacttttccaattgcagaaaacgaatcaatgtcgatcgatacaccaaggtgtcaatcaacactactcttgacgactctgtttttcctttgtcgagtggaatcgacaattttgtggaggaggaggaaactattcccgatggtgtcgactgacacccagctcctgtcgatcgacacgcagctcgttcagacaatgtgcaaattcttgctgaaaccaaatcagcaaatcggcgaattcctttccccaagagtcctaaaaagtcaagacaaaccttagatgatgtcagatgcaaggctatgattgataagctgaatgttgagatgcctctagttgaagctattcatctatctcccacaatcagaaggtaagttaagacaatggtcactaagaatttgtcgaaagaatgctgtgttatgatgatttcagagcagggcagcgacatcattcaggaacgaatcccaagaaacctgcctgattctggaacctttgtactaagtgtcaccatcaatcatgattccttcccaagagctttatgtgatctcggttctagtgtgaatctgatgcctcgttcagttactatgcgtcttgggtattccaatcttgagcttacctttattactattttcttggcagatcgttctacccgaattccaaatggatttcttattgaagttcccgtgatggtaggaaagagcatgagtcctacagaccttgtagtcttacattatgagaaggaacctaaggatccattaatccttgggagatccttcttgcacacagctggagca

SEQ ID NO: 51391 - DNA, 559 bp, Arabidopsis thaliana
ctagtaacagccgccagtatacacgagcgacaactaggtgaagaccggggataataactggcaggtctacacccaggatagcagtgatccacacagcattgcgaagacagcgacaacactggaatttaatgctaatggcacattagtggatagtgcgatggcgaataatatcgcaaccggcgcaattaacggtgcagaacccgccacgtttagtctgagcttcctcaactccatgcagcaaaataccggcgctaacaatattgtggcaaccacccagaacggctacaaaccgggcgatctggtgagttatcaaatcaatgatgacggtacggttgtcggcaactattccaacgaacaaacccaactgctggggcagattgtactggcgaactttgccaacaacgaaggtctggcatccgaaggcgacaacgtctggtctgcgacgcaatcttctggcgtggcgctgttggggacagccgggacgggaaactttggcaccctgaccaacggtgcgctggaagctccaacgtcgatctcagtaaagaactggtcaatatga

SEQ ID NO: 51392 - DNA, 377 bp, Arabidopsis thaliana columbia
aagaaagagaaaaaagtggatgaacgtttttcacaggagaaacgattctcagcatttattgacagttgtcatttaaccagtgatttattttcttcgaactgaagctgtaaatgatgactaaaaccgcatccaaaatcgcaccgcaacagtgctgtaacagtatcaaaatctttacatatacatatgtatctatgtattttcgttattatttgaactgcaccattcggaaaatatattgattggattaatttttttttttttgagatactttctatcacttttaccgtgaagatgccctaaattcagcaattaaacacgcaagcaggaagagagaagtcatcatatcataccaacaaaaagtggcaatcgttcgctct

SEQ ID NO: 51393 - DNA, 564 bp, Arabidopsis thaliana columbia
attttcaatttttcatgcacaagtttttttttttcatgcaaaatttggagactaaagaaaacaaaatgaacccgaaattgaatataatcaaaaaaattagaagcgggtagtaaaacttgagaaattagatgggtttttgaatattagattcaaatactgcagtaatgcaaacatcccgaatgttacgtgatcatcttcatgttagcaaagagagaaaacacttcccaatatagtgtaaaactcagttaagaagaaattgatcccttggagaaacgagaaaaagattaattatacatgtagtaatattaagaaaataaacctttaaaacggtttaaataaaataaagaagaaactgaattcttgggacttgaattttaaagttatgattgacatttatagtatatattaacttattattaaattgtagtttaatttcttagtctcatattaagtaatgaagtaaatacgctgccaaattgtgtataataaacaactttaaacaattgacgacacaataaacaagaaactataaacgatttacttgactatagtatattatattat

SEQ ID NO: 51394 - DNA, 895 bp, Arabidopsis thaliana columbia
cgatcccaatgcaccaccctgaaacccaaaagaaaagaagatatttgataacctatcatattgttataacataatcacaaagaagaactatggtgattataagtaggattcaagtaactaataactttctactaagttttcaacagtgtcgacaaaaagctgaattttggtagtagagagttaaaagagcttacaatggtgagaagtgtttccagtgcctcaagagatgctattttcaatgaaatcgggcttctcaagtgattgtgagggattctcaattcaaaaacagaattttctgcctcgactcctgaatgcttcctttttttactgcaagcctgaagaagagctccattagtaagcgaggggtttttgctagatgccacatcaaatgcttctaaacttgtctggtctagatccacagaggcattaatgacaacttcctgtgccagttgcattgccattcctggtcagagaagtatgttagcagaaatgatcttatattttcatcacatcaaaggcaagatcttgtgaaattacctatacccatggatttgagtaaggttgtagtgattgagtagagctttatcctcaattctggcaatgaacatttcctgaagtagctactaacaagtctcaccacagatgcagcatatggtaaaagttggctacaaaatgaatcaatatgaggatgttgtttagttcctaagacacgggaaggtgtggtaactagtaacaatccattatttggaaaaacgagaattgcgaaactattttcagcaagacataaactaccaaaggaacaactcctcaattgtcagtgtcaatgaaattaaggtcaggtttcagttgaaatataatatttaatgtgtttgacatgtaaaatatatagttttcg

SEQ ID NO: 51395 - DNA, 1041 bp, Arabidopsis thaliana
ggtgacgaccttctcctctcatcctaatgggaccttctggactcttctcacactcttccatacggtcaaagcatttagctaggtaagcaccttgctgcgcacaaccttaaaaatccacatataactaattgataagaatccagcaaaaatgagatttattgaagatgaacgaagacttaaattcctaaacttccaccgaattacctgtgcagtagctggaagaaacttcacttgtgagtcaacctgagatagagccgatttgaactcttcgatcttcagttcaatgttattcttagatacatcatcagtttcggcttctttaagaagatctgcaatgccacgcatacgtttactcttcaagtagagctccacttgagggtatctaacacaaatgtcatccattgcttcttggaactctttgagagtcagtgtcccagacttgtctttgtctgctttgctaaaaatagcagaaacatcttcctgcaacaagaaaccactaataattttgttttataatccaaaaacattattccagagtttgggaagcaatagaagcgtcaaattaccatgactttgcgctggttaatggttgcgcaatcaccaagggcatatatattatcagttccttctacgcgaagccattcatcagttgccagagctcgtctattaccctgaaattacaaagacaatttcttagagcgagttgttgaaatttgtttgctaggagatgttgaaaattgtaaagtgtgagtttaaatctaaagcgcattactttacctgaccaatttgtttcataaaatcttttatcacaggacgagttccaataccagttgaccagacaatcattccataaggaatcgaggaaacctctcctcctttggttttagcagatatatctttctcattcactttagttaccatcgagccaagtttcacatcaattccatctctgctaaacttttcttcggcaaactcagtgattctcttgtcaaacctgtgaaagaaaagctttccatgaattagtaacgaggtttttatgga

SEQ ID NO: 51396 - DNA, 1536 bp, Arabidopsis thaliana
acatgcttgttgaaatcgtgatcgtggaagaggcttggtaagtgtatccaccaagttgatcaaagtgtagagatataagctgcacgcatcattctaccatgtatttgattgtgaactaaatgatagtcgagggcaatatgtttcatgcgggagtggaataccggatttgcgcaaagataggcaattgtcatagtatgttgtcacagtagtcgagggcaatatgttgtcacagtagatcactagagctgtcggtaaggatatttgtagttcagtgagtagagaacatagccattgtacctcgtaagcagtatttgcaacggcccggtattcagcttcactggacaagcgagcaacaccgcgttgtttctttgaagtccaagagattggattacgaccaagatagattaagtagccattcgtggagatgtaatattcagtatcaccaccccaatcagcatcggaataggcatgaagaagcattggtgaggcagcattaagatatattccatgtgtaagtgtacctgccaagtatcgtaacacccgttttgcagcttgccaatgctcattagtgggcttgtgaatgaattgggataggcgattgatggcgtatgaaatgtcaggactgaaggtttctgcgtagttcatttaatgacaggactgaaggtttctgcgtagtcttgcccataccgttgatgaaaacccttagcgacaagtcttgctttatatcgatctaggagcccattggcatggaatttcgtcataaagacctatttgcagccaatgatattttgagtaggttgtggtgggactaaatcccaggtgtgattcttcataagtgcatcgaattcatgagaagaggcacaactccaattttcatctttcaaggcttgttgaattgttgtcagttccttggatttgtacttggatttgtgtttattggcagtgactgtgaggctgagtttgtttattggtttgtgtatattgtttttggctcaagttcgcatattgtgattattttgtggtggtttatgaatttggttttgtggttgaataggcgcacgttggattagattttgtggatttgtttgtgggttttgctgagttgtgggttcaactcattttggcgtggagcaatgggctcaattgaaagagggtctgcatgggtcgagatttgcgacccatgtataattggagctgtaggctcagatatatgagatgaggaagagttagggatatgagataatacttgtgacgatgacgatggttgtggtgagaggcgaaggccagagtgcggggatcccggtggcgttgacgaagttggcggggtgaccggtgacatctgataagctctggtgtgagacgaaggtgaagacgaagatgatgatgtacgagttgttgtgttgttgggcaaattctgggtgatggatgatgggcttgttgttgatgggttattgtattgggccagattatttgattggaatgggcctgtttgatttgagcccaatattcttggtgagtcttgaggggatagagtcg

SEQ ID NO: 51397 - DNA, 1187 bp, Arabidopsis thaliana
tttcaagaactcaggttcttcagatttgcaacttgttttactaaaccgtttgatcgctacagcagaaccatctctcaagattcctttgtaagtcgcagagaagttgcttcttccaagcaaattcacttctgagaaatactgtgtagcagtttcaacctcttcaagattgaatcgaaagctctggataacttcttgagcaaagacactgagattcctattgtctgaaagtggatcccaaccattagtatattcaagactggccaatggagaaccattgttcttcctaaaacctcctcctacggtgttgagacggttgtccgacatttcataagtggttgaaagcttctgtttgcgtctgcgataatgcgtgaacaagaggatgctaatagcagacaatgcaatagtcgagacaaccaaaccaataaggattgcaccttggtgagattttggaggagtattacagtttgttccattacaaggtgaccgtagattagctgattctggtatatcccgggatggaaaaccaaacacggttgcaccgtatggcttaggttcctcaggagctgtgccattgcaagatttcaacggcgagaactcagctccacatagtcccaagttgttttcaaacgaaaaaccttcatttaatctcttcagtactgtcaaatcggtacaacagagaaagaaatataaaccaaaatgagaaacacttcacaaaatacgcaaagttagtttcaaagatcatatagtgaatcagttttctaaccaggaggtacattgccagtgagggagttgttgcggatgtcgagaactcgaagcagaggagggctagctaacttgcctggtacagaaccaaacaaatgattgtagctcaaatctagccgctctagagcacttaaatctcctaaactcgcaggtatagctccagtgagtttgttagattgaagagcaagaacactcagcttcctcagtgaactaagctccctaggaatgcttccagtcaaattgttgtaacagagctgcaaaactacacaacaacatagaccaaaaaaggaatgaagcttagctttgacttacattaacttagaactaattctagatttagaaacctggtcctgctaattaaagctcaaatataaagccttttgaaagtaagtgaatcaattatctaaataaacaaaattaatcaa

SEQ ID NO: 51398 - DNA, 904 bp, Arabidopsis thaliana columbia
tctaaacaatctgaagtaaaaagctttctcagcctcagcaaatcactctccagcccatctttctgaaatttgtcacccactttatctctaacattagccgataaaccatgccctttcttcttcatcacatcaaccaacccccaaaactcatcaacaagtccattaccacccagaatccgcagcatcatgttatagttcttcgagctaagttcctcaggagaagcctccttaatccactggaaaaaacttttggcaacatcagggtttgattcgagctttctcaaaaccttcaaagctaaatcttggctaatcactacaccactcgattccaactccttcctaatctcatcctcaccactcaatctactaaaaatatcaatcacggtagcctcagcagaagatttctcttcaaccgcaggctcggacgagaagcttcgacccactgatttcactaagttgccagagctcgtcattggggatcgtaagggacaaagttgttcactttgttgcaaagctccgatcccagggtgaatgaaagaagagaaagatcgcgatgaaatggaggttacctgagaacaaggagatagataaggaagatgagaacgatggtagcttcgaagaagcatcaatcgccattgttgatatctcatctcggatttgagctgggttaacgaaactaaaaaagggtatagtgaagtggatttgatctgaatagaaaagcttgatcctttacagtttacaaagaagcgagactgaagaacagcgattgcgacgtcctgggaaatgttagggttttagtgaggattttgatttttgactttttgaggtaacgaaacgatctaaggcaaagagaaggtcccacacaatgacgcagagcaacaaaaataaaacttaatgatatgat

SEQ ID NO: 51399 - DNA, 596 bp, Arabidopsis thaliana
ggaccttggtggcatgttgactgaaccgcctatacacttccatctccctctgaggcctagtagaccaagattcagcctcatccacgttgaaatcggcgtccattgaggattcgttgctgtttgaactcatggtgaagctaaactctcagaaatcaaaactaaagcttagtagataagtctcaaacaaataaaaatacttgcgatttgatcgagtgaaacaggggggtgggcaagtgattttttttttctttgaaggaagctgaaactgaaattttcgagatggtgtgaagcagaaaaaaaatgagagagatcgtattgaagtgcgcacaaagaagaaagtgagagagagtgatatcttatctttaggtttcgatttgaatgagtggaggaggatggtctcctatgctttctttgttgggataagggtgttgccaaatagtgattgagcatgatgggtaaaggctttgtccaccgagtaatagaatgatggggagacaagtgggcactcgatcccaagcttggctgtttagttgctttactcgccaattgatagagtaaaatggtgcccaattttactcgaccattgatagagtaga

SEQ ID NO: 51400 - DNA, 587 bp, Arabidopsis thaliana columbia
aattatgtttaatgctagatttagaataattaactagatcttgaatccagacaatagatatgcccgccataggtatctgtagttggatctattatttgatgagtctggtttataggtgtataataagaatcggcctatctactaagatgaacaattgaactcgttaagaatgcatatttaggttgatagtttctcggcttctccggttattataagctatagacatagggagttctgcggcacgccaccgattattccataattagagtttgagtttaagaatggttcgataacaacctagctttcgttagatccactaacctacctttcgttagatcttttcctaatcgtttacaacccaatcatcctgttgttttattggttagtttacttactatttcacttataccctactagctttatcttgacatttaactcattgtttgaacaaaagaactccgtgaatttgatcttaaaatactgcaattgatctcttatttgagagagtagttttaggtaatttgaaccatatcaaattcccaccgttgccgaagttcttgggaatcacattgagttttgtgtagaga

SEQ ID NO: 51401 - DNA, 711 bp, Arabidopsis thaliana columbia
tagttctatgttttctcttgtctttgaagaatttgtgaatacttggttcttttggctacaattttaagctctcgtaagaatgttataacaaatgaaaacgaatatgacatgtaatatagtggtttgtattagtgttattgatgtgctaccgtcctacttcaaattcgtataatatatcaccgttaaacgcagaaaaacaaaagaagattccaaacaagataatgcaccagagatagtcgggctatgatccaagggaaagggatcacacctcccctgcgatttccactgtatataaactaagttgttttgttgaggccaactaaaactcttgtacctttttgacctaaatgattattttgtggtaagtttacagaaaactaatttcaaagagcatgacaaccctcaaacattatagtttttggtatcgagtttgagaaatcgaccagatactctcgaatatagtagtaagctttggtatcgagtataagaaatcgaccagatactctcgaaattagtatgctttggtatcaggtttaagaaatcgaccagatacacgatgttgatctaagaaagtatgcgataaacaaaaacatgttgaaagagagggtcctacatttatttacatgcttccaaaatttatgcaatcaaaaaatatggccctctaatgttttcgcacttaactatgcataaggataaacaagaccaaacaga

SEQ ID NO: 51402 - DNA, 487 bp, Arabidopsis thaliana columbia
actctagatttgcgaggatatatattcggatatatactcgataacctagtttgagcagactcaaacctgccgcatcaaaccctaaacctaattttttttcttcgattctcttcttctccgatctgttttcctcgtcgccggcttctcttcttctccgatctattttcttcgccgccgcctctcttcttcttcgatctgattacgtcgccgcctcttattctccagcagccgccgcaactcttcttctccaggttcagccgcgagtcgatctgtttcttctccaaggtaacgtcttcttctccgatataacttcttctttccattccaacttccaccgtccgatctaacttcttcttcttctccgttgcggttcgtcttctcctgcagtcgtcgcgactcttcttctccagcagccgtcgcgactcttcttctccagcagccgtcgcgactcttcttctccagcagcagtcgcgactcgatctctttt

SEQ ID NO: 51403 - DNA, 748 bp, Arabidopsis thaliana
ctgccattgcttgtaggtctctggccttgcaaaccgctcagacccttcacaggctatcacactcattgcatctcttatgattagttccctctccaccagtgtcctgcaattgtcgtcttctgataatgtggtctcatacatgtcaaagagtgacgagcaatggaagagagcttctctgaacctttgttaggaagaagggtgaattgtaagtcccgttaatctctgcaaacacaaagaggtcagggttgatgtctctgaatagtttcagagccgtgtctctcggtgagttgagggacacggtttcatcaggtgtatattgtagccggaggatgcagttgacaactgttgtctcgccactattgatcaccagatcatcaagagttatgttctcccaattcttggctatgaaactgtactcaaacgggacattgaacttgtcacagaacctctttagtcttcgcccggtctcttctacccgctctgatggacggaaacctgactgaggaagctcgataccagtcacacggagcagtggtggtccgatgtcacgttttgacaaagcttgtatcagacaaggccattgaaatccatagagaatcccaaaatcaatgatgtgaagtgtggttgctttggaagcaagctcattgattgttctgtttgcagtgaaataacacattattaaggtggggcaagcctgaacaaatcccttgtacgccttcaaaatgtccaccattgatgttctgctaga

SEQ ID NO: 51404 - DNA, 320 bp, Arabidopsis thaliana columbia
attttcgatcaagaatatctaagtctaattctcttctctgtttcttatcactctcacgtgaagacaaagagaattacacactcaccttcaaacttttgcaatgctctgaagtttttcaatcgtatcgtagtattctagagtgctcaaaacgcctcacgctaaactctagaatacttatacatactctccagaaccctaaacctaggatctccgagaatctcattttaaggaatctttcttgttttcttcaagcttattccttcctaaatctacgagatgatatcttcaatatcttctcggcaatgcttgtctttgacacc

SEQ ID NO: 51405 - DNA, 634 bp, Arabidopsis thaliana
gaatgtctacttggcaagattcaatttcatctgaagcttgttcaagatattaaagcattctcccaagtcttaaatgtgaccgctctcttttgacgatttcacgagcatgtcatctatatagacttccactgtttttcgagatgattcttgatcgtcttgtttgcaaatcgttggtatgtcacacgtacatttttagttcaaacggcatgatcgtaaaatagtatatacctcggttggtgctgaacgaagtatttttcttaatcgttaggattcattgatatatccctatttttaccgtttttaactatgttttaggtataggctttagagtctaattgttatttctagaggtttttctagtctttttcaggtctttacatttttgagatgcatttgaagattatggagctttctggagcaaaacatacaacttaagctgcagaagcaatccagagacgaaaatgcacgtaggtgtcgaacgacaccacccttggtgtcgagcgacaccaatacctgacgacaattgaaagacgcaacttattgttgttttgaagatttttgaattcggcccaaaactttctcctatatttaatgaaggctagcacgttcttaagagatatttatatagctttaa

SEQ ID NO: 51406 - DNA, 984 bp, Arabidopsis thaliana
ccgtatgcagtcaaaattgttcccgcacaaaagagagaggagattttatttgtctaacctctttggttatgaatcttagactcttagtttaagaagtaccaagcgattgaatttcacaagcttctcaatctcttgctagttccttcatgttagcttcaagaagaggccaaacaattataagaatataaattttattacataaacaacaaaatcgcaaaggctttagtagcgattaagatttatcataacttatgtatgattgtttgccaacacttcctagtatatatgtttacaagttatgatatttttcttgatccaagattttattacgtgttaatatattcttcaggtgaaaacgattccctcaaaaaaagttgccaaacatgttgtagacacatatgaaagcatgaatcacagatcaaatatgttttcaattcaccgtaatttgattaacaaaaactaaaaaccctaaatcaaacattcaatgactcatcctcacatcaatcatgtcaaataacaaacacttagcctccattgataataaaaaaaactcctactcaatgcttacaatataaaaccctaaattcagaattcaaataaccctaaaagaaacatcaaatttcccaaattaaatcatgataaattgcagaaagaaatagattcttaccagttatgagcttcagtcagcgattctccgattcgattcattttccacatgcgctcgtgaccaccggttttgcaaaagacggatccgcatccgtcgtcgtcgtcgtttgctcatgcccaacaactgctcatacaacagatcgactgcttcaattgaaccttaatcgtcggatcaaaagtccggctctgtcgccgtcgccttcgccatcgtcgtttcgttgagagagagagagagagagagagagagagagagatagagagagagagagagagagagagagagacagagagagagagagagagagagatagagagaga

SEQ ID NO: 51407 - DNA, 523 bp, Arabidopsis thaliana
gatcaagatggcattgcagctcttccttgggttagcatcaggattaccagaaaaaaaacctcttgtcacttgatagattgtgcagtttgagctacctgtacatctagcttctttaaatgagagctcagattgtcgatctttccattaagatctgtgtagatagcatcaaacttgccattaaactgcacaacaagctttgtttggctctccagaatctggtcaagcatcgattccattcttgtctctgatgagggtggagggggggcttagtaagttgaatttccataggtcctctgaaagttgctttgaggaaaagtcttctggaaaggaggctttggagtgtagttggaggaacctggttccctgtaaacctggtgccactgaagttgccctatggctgcccaaactgtctgtatccctaaccatctatgtagaaaactcattccgctgactcaggctcaggctcaataatctctccttcagctccaaagtggacatgcttcttccctatgagcaagtaatg

SEQ ID NO: 51408 - DNA, 686 bp, Arabidopsis thaliana columbia
atccttttgtggcgtcattcaatccatcatctcgtctttgagtcgtgtgtcgtctctctttcgagaatatccactccagatcttccaagtgccgaaattgggattgattcctcaccaggatcatatcatgtggtatccgagcacacttggaggttgagtcgtttctgtctgtcatcttgttttaattttcataattatttggcgtgtgcaaaaattgtgaaatcaattgtcacgggttcgaaaacgagtctagtattttgtaaaattgtttcttgaatttttggaaacgatttgataatttttagcgtccgatcaagtcaaacagtcgtaattagggttctaggagagttttgtgtaagttgaagggtaattttgtgttttttgtgtctgttgtgttgaatacattctattacaaaaagaacttgttactggtgtatttgtgctttgtttctcaggtcgcaatgtcaacaactgaggagagatcaagccaccaccacaacaagcgtctaattgaagctcttaccactgaaatggagcaaagtttcgacaaccacttagatcaaattcgtcaagggcatcacagagcacgaaaaatgaaggaacaagagcttaagtctaagccaccggataactcattgagatcaacacagagcagtccacagaaaatcccccacactcctaaatcc

SEQ ID NO: 51409 - DNA, 435 bp, Arabidopsis thaliana columbia
ccacctgtccaatctaaccgacttttaaattctgaccatcttattcctattcaattcccgatggcactgatcacagtcaaatctacataaacaataataaaaatcataaataactctacactagtgataacaaataaaatcataatataaaattgggattttcgcatgtttataagtaaagctaaagtgagagtagcagagtgtgtggacctaccctcgccggcaaactttttcctctcttccgctttctccttttttcacagagttctactctgttttcattttttcttctttctttcgtttcttaggtaacatcaaaagatagtgtgtttttttctcccactgcatatatggggaattgtcaggcggtgaatgcggcagtgctggttctacaacatcccggcgggattatcgaccggtactatagctctgtat

SEQ ID NO: 51410 - DNA, 544 bp, Arabidopsis thaliana columbia
atattgtttttttgtatgactataacaattcgattatacgcatcaacctacatagatatttgatagcagttaattaatacaaaattacaaaatatttagataatgattcataaacatatcataaataagatcaacattaataaaataaatagttttttttacggggcggattggcgagacgggtttggtagaacgttacttaaataacaattgtaaactataaaataaaaatattttataaatagatacaatttgcaaacttttatatatactaacttaaaaaaaaaattgtccacgcggtataccgcggataaaaaactagtttttatatacataagtggattacttaagagaaaaatgattaaaaggtactctttactctttactcctttagaagttacaacactatactggattacttaaaaacaaaaactttcatgaaaaagagaaaataataaaattgttgactggaaaataaaaatacgattaatataaagaaatctctctaacaactttaccaatcatcgtcgctcacatgaagaag

SEQ ID NO: 51411 - DNA, 583 bp, Arabidopsis thaliana
tctatcttctctgttactttcactgaaatatttatctctttttcaggtagaaaggcttattgtcttacatgggtgttgcaatatgtcaatcttttcatgattaattgtggtttcatcatactagctggttccgccttaaaggtacaataaccgaaacaaaccgttttgttgcgaaaatccgaaagttagctcatatggctctgcttttgcattttgtgcaggctgtttatgtactttttagagatgatagtctcatgaaactgcctcacttcatcgccatcgcgggtgttgtatgcgcgattttcgcaatcggtattcctcatttatcagctcttggaatctggctaggagtttcaacaatcctcagcataatctacattattgttgcaatagttctatcagctaaagatggtaaacttttatgttaaatcaaacctcgaaaatgatttcatataaccacaaaaaaactactcaccattttgtgtgtttttgtttctggtttaataggagtaaacaagcctgaaagagattacaacatacaaggatcatcaataaacaaactctttaccataacaggagcagc

SEQ ID NO: 51412 - DNA, 580 bp, Arabidopsis thaliana columbia
tttccatataaacctctgacttgtagctctagcaaacatcacatccacatttacggtatacaagcacacgacccttcattaaaacttccagcttaccgtttttaagaatcgacacttgctttctaacgttggtaactcttttgatgcgtaactcttgtaccttagaaaaatttaaacttttcaaccactgaacactagtgcacaaataaacattcttctctagcaccatattaacaaaagatgaaaatctcttttaccttgatatggcttctcatattcctaaatatgcttattgacatggggttccttcccattcctatttttccaaggtttctagggctacaggaagtttgggcagccacagggtaacttcaatggcaacaggtttatagggattgagagttcttcgagctacactccaaagcctgcctttcagaagacatttcctcagagcaacttctagaggacctatggtatttcagcttactaagcccccccccctctctccaccctcatcagagagtagaatagaacccatgtttgagtagatctagagagtcatcaaagctcgttgttgagt

SEQ ID NO: 51413 - DNA, 783 bp, Arabidopsis thaliana
cgttgtcacagtactgtccctcacaaaaacctcacacaacgtctcgatctcctcgcaaagaggatggtttaagccatctaaaccaaggtagttagagaccaatgtcctaaatcctaaacctgtacaataagacatgttgatatgcacatccattcttccaggacgtagcagagcaggatcaagccggtccttgtgaatcgtcgtgaacacaatgattctctcatctccgaaactcgaccataaaccatcaatgaaattcagaatccctgatagagtcacctgctcaaagacaatatcataatcagaactaaaaaccaatagattctctcaaactcaaatccaaaagatatctcacctttcccttaatttgttcatcttcttgattctcagcttccctatctctcacttcagcattacaatcaatatcctcaataaccaaaatcgaacgattcgtcgtagataacaaaaccctcttcaactcaccattgtcataaatactactaagctcaagatcaaacacatcaaacttaagataattcgccatcgcagcaatcaaactagatttaccagttcctggtggcccatacaacaagtaacctcgtttccaagctttaccaactcttttgtaaaactccttcctcttcaaaaacctctccaaatcatcgatgatcttcttcttcgcattcggatccatcgccaacgtatcgaacgtagacggatgctcgagattgatacatcccaattcccacagccattccatcatcatcatcactagcatacaca

SEQ ID NO: 51414 - DNA, 478 bp, Arabidopsis thaliana
taccatttctcatcatttgtcatcactttacatgtttaggatagatttgcatgcatgttgcatatttgcgttgatttcaggtgatttggagttgttgacgagctatctggaagaagcgggcctgatcatgacaaaccactcgaccccaaggtcgagtagggagcttcaagatctcaacagatcacttgaccccgcggtcgagtagaggacatcactacttcaccacatcactcgaccccgaggtcgagtgtcttcatcccatcacctgaccatcacttgatcacatcactcgaccccgaggtcgagtgtcttcaccttcattgccagaccactactcgaccttttcactctacctggaagtcgaatatcaccatcaccaccactcgactgcatactcgatgataagcttcagagccttcttcattccacactcaatcagacactcgagcacaaggaagaaaagaagactccagttatt

SEQ ID NO: 51415 - DNA, 815 bp, Arabidopsis thaliana
acacttatgtattaactgagatcattttttggtttagaaaactgctagtgcagacccatctgaagtgacaaggctaaaggtttgggttaagtcacatactaagaaggatggtataccagttaatacgaatgctgctgaaaagattgtgagttgttttgtttcgtttgatttgcattttggcattttgaatcacacttgatattttaaaatgtatcttatgagttttaaaaaaaggcagaagagattgttaacaatgataatccatcggcaaatgaagcacaagattcactaagccaactgttagggcctgacaattctggtagactgagagcaatgggtcgcaatatgaataagaccaagttagcttgtttccaagtgaagcacaagtgtatggctgaaatgcaagagaatcagcttcatctacaaaagaaggtcaatgagctacaagaagtaattgaaaaaatgaagaaccaggttagtgaacttatctatttatatatacaaacttaaggctcaattagtacatacgatttgactttgtttttctttttttgtaacagagacaatcagctgaagtaggtgaaaactcagctgcaagagtaagtcactcatatcatatactttgatctgttctaacagatacactaacttagtactttgtctatcttttacttttacagagtgtgaacaaaagaacacaaccaaaatgtttcttacttgattgggctggttcttatgcaaaagttgctgagggatgtattatttcttctgatccgggtgaattagtgaatgactgtcgcttaggcctacggatg

SEQ ID NO: 51416 - DNA, 499 bp, Arabidopsis thaliana
tatgaagataactcagccataactaaataaaaagtaataactcagccattagcttaccggagacgactagtaacagattggttatttgtagatttccgtggaacttttggtgtctattgagtttggggtttagggtggccttgctcctcttgggttaaaaacatttctctaataaccactctagagtttaatgttgagtcagctatgccagtttggccaattaggcctaccccaatgaccttcagatgctctttcatctgtttgacctcattctcaatagatccaaaccttctttcaaactttgcatcaatcctctcttctacttgatctccaatcaccgtccgacgggaggacgatttctttgatgcttttatcaacggtgtcaaaccttgagtttaagggagatattaagttggacaccatatccacgaacgacacatctccccgaacatcatgcttgtcctcgtcctcatcagattcgacagctacttccttatta

SEQ ID NO: 51417 - DNA, 476 bp, Arabidopsis thaliana
ccccatttttttttttggtaagctgaggggtggcaattgcctaccccaatttattaagaacaaactacaaaaaattacaataaaacagctcgagggaactctgttccattaacatctgcgagcaaaagtaaacggactccctctgggcatgcatcaaaacaatgaagccctagcggcaaggtaaaggcatagtttgctaacccgtcagcgagacggttagcttccctatacacgtgtgacacacggactaaccagtccctcgtaaagaagccttggcacaaccgtaccaggaaggacagcggatgagcgttgcttacccctgtgcttaaaaaacccaccaccaacttgcaatccaagtctaactccactcgtcgaaaccccttgtcccacgcaatgagcagcccatagtaggcgccccataactcggctaatggcgctgcacaagatccaatgtttagtgcaaaaccacctagcca

SEQ ID NO: 51418 - DNA, 482 bp, Arabidopsis thaliana
ccctcaaagaaaatactataaaattgtcaaaaaaaactcaccgaccaacacattcttgttaactgtcttctctatgatgttgtcgaaaggagtaaaattgtaaaacgagagtgcatccgttcgcaaagctttagtaacaatagtctgttccataaaccatatctggtagtcatgggatgttgctctcacagactcagcgtcgtttcggaccgagaaattagtgataattatccactcatactcatattctcgtattcgatcaaagtaaaatgacgcaaggcgacgaggaatggtagccttgattcgggaacggggaccctacaccaaataattttaactatatacttgcaagttatgtgaaagaaacaaaattaaacatattcgcaatatattaccgtttgatctgccaatatgaggcccagtttgaactcatccggtgccacaaactttttgaacactgtcacaacaaaaacgcaaatagt

SEQ ID NO: 51419 - DNA, 424 bp, Arabidopsis thaliana columbia
agaaacaagatgactaatgaaatcaaacgcggaatctcaataacttggaaaaatcgcaaactacaggttgcagaagcaaaagcggcgtacatgagtaaaactgaaaataaaactgaagcaaaaacgcaatgtcgactagatgtctcaggacagaaccctaaaacatctatttataccaaacgaaataaaatgatagtagacgggccaataacctaatcgtccggcccatagagtgataatgggccgagatgggcttcgtgatccgatggaggtccaggccgcttccaaacactttgtcttctcctcttttcttccttgtgctcagcttgtctggttgagtgcggatttgagtagactgtgaagacgtgatcgagtgtccggtcgagtgatggtgatggtggtgagtgatgatactcgaccaggg

SEQ ID NO: 51420 - DNA, 814 bp, Arabidopsis thaliana
agttgacaatttatttcagcatagaggtcatagtcgatgttgggataatgccaaattgcaaacttttgtggatcaatatgaccatgactatattaaacgcatctatctctcaacaaggagtaaaacggatcgtcttatttggagctacaatttcacaggtgactatacagtccgctcgggttattggttattaacgcatgacccgtcaaacaacatccctacaatggctaaaccccatggttcagtagacctcaaaaccaaaatctggaatttgccaatcatgccgaagctaaaacattttctatggagaataatgtctaaagccttaccaacaacggaacgcctcaccacgaggggaatgcgcatcgatcctggatgtccacgatgtcgacgagagaatgaatctatcaatcacgcacttttcacatgtccttttgcaacaatggcttggcggctatttgacacacctttatatcgaagctctatactgtctgataacattgaagataacatttcaaatattttattacttctccagaacaccactataacagattctcagaaacttatcccattctggctactttggagaatttggaaagcacgaaacaatgtagttttaaacaatcttcgagaaagtccatcaataacagttgtaagggctaaggcggaaacaaacgaatggcttaatgctacccaaacacaaggtcctagaaggcttccgaagcgaacgacagcagcggggaacactacagtgggttaaacctcagatgccttacataaaatgcaacttcgatgctagttttactgtgca

SEQ ID NO: 51421 - DNA, 614 bp, Arabidopsis thaliana
cagcataccatcggagatcttccctcaacagcgttcagttggtggaactctttcccgctgtagctcccaccgaaaaattctacaaccattagttgctcttctggcattgagtcgtctatctgaataggttcttcaattctcatccttgacagatggtcagctgcaccattttcaatgctttcttgtcttctgtttccatgtcaaacttctacaacagaagtatccatctcaatagtcttggtttagtatccttcttagaatacatatgcctccactacaagaaaacaggcgtttaccgactacaacactagtcgtttcatagtcgtaaacagaaataatacgactaatcagacgactaatcagagtagtcgtatatatatagtcgctaagcaacatattcgtatgttagtcgtaaagttacgactaacttacgactacgtaacagtcggcatgaaatagtcgtcgattggtcgtaacatttggtgactatacagcgactatgatacgattaattaacccttttatgggggattattcgtgtagtcgtaaaatagtcgtacttctattgacgattactttgcgactagtttacgatcaattgtattgaactgtgg

SEQ ID NO: 51422 - DNA, 1383 bp, Arabidopsis thaliana
agtgaacaatcctctttattcttaaaatcgcggctgatgaaatgtcacccccctcgtaatcagcatccttcagggctcgctgaaggcatctgcaagtcaatcaacgaatcaggcgttaacgatatgttaatgcattcgataatattattactagagagatatagaaagttgaagataaagttttcttttattaatgttgttatctgtcgctaacgataaacacatactcttctatatgtatgataatatatagatatacttttaacttcttgctttcctgacgataacaacagttgtagctatctaacaatatatttagcaagttgatttttttttttaccttccttcccttgatcgtcaaaatatggcggagcatctcggtcatacaagaccgtcgcaaccgctatatcctttacggtcattgcatttctctacatctccaatactcttgaggtattggagaccaatccaacaacttcactcggtaaggcattctctatcatgatatcttttcctttatccctcatggtgatgggttgaggattttcaatgagtgggccatcggcgtcagaataaaagtgggacagagtctcatcacctacattacgaaacacgttagtcgataaatgcgagtaacagtttaaaaacttatcagttaccaaacatgttatttgttaacaaacctatcaccgatacgctaaggctgtcggaagagtcagtatcatccattaggtcttcgctgcagaaagaaacgctcgttgatatcgaagttggcgtcccgaaggttgaatcacttgaagacaatgcgactatttgtggtcaacagcttgcgattctgcccctacaagggtcaaatgcaaattttcaatttcattgtcgtttgcatgatatgtacttccgaagtctagatgtctcgctgtcttctctttatcgcatccgtttgtttcactcggttgactcccttttagcgacatttctcttgaacacatttcacgcaacattgcttcttgttgatttgttctccacacctcgaataaacgatctttttctctctcatcgtcatctataaccttctctttgcctttcaaacttgtaattgcccctggttgtggtactttcgatggcgtctcgctagtctccgctgcaatctccgtgttttcccttatgatgacacctccatacgggttgtgttattcaatctctttacgtatgccgacgtcgttggtgtcccccatggttgctatatcttgtccgtctcctgaaatctaaatattattaacagatatccaacttacttgataacttaaatattatcattaacgtggttttgaggtttacccgagaggttagcaacagcattctggttaacgcggtacccataca

SEQ ID NO: 51423 - DNA, 1014 bp, Arabidopsis thaliana
tatttgtacccgccgttgtccgttctgtgatgttgcccacggtcgcccggtagctcctgatgccaatgaaccagtgaaactggcgcagaccattgccgatatggcgctgcgttatgtggttatcacctccgttgaccgtgatgacctgcgcgatggcggtgcccagcactttgcggattgcattactgccattcgggaaaaaagcccgcaaatcaaaattgaaactctggtgccggatttccgcggtcgtatggatcgtgctctggatattctgactgcaacgccaccagatgtgttcaaccataacctggaaaacgtaccgcgtatttaccgtcaggtacggcctggtgcagattacaactggtcgctgaagctgctggaacgctttaaagaagcgcatccggaaatcccgaccaagtctggtctgatggtgggactgggtgaaaccaatgaagaaattattgaggtaatgcgcgacctgcgccgtcatggtgtgacgatgttaacgctggggcaatatttgcagccaagccgccatcacctgccggttcaacgttacgttagcccggatgagttcgacgaaatgaaagccgaagcgctggcgatgggctttacccatgctgcatgcggtccgtttgtccgctcttcttaccacgccgatttgcaggcgaaagggatggaagttaagtaatcctgtaataattacttacatctgtctgataaaaaacccgctttttgaagcgggttttttgtatcgaacaagatattgagggagcgtcctgctcgccacgtcactctttatgagagagcttttcagcctgaagatcaacgtctgcgccttttttcgccgcagcatcgtcatcattcatcgccttcttgaaccctttaatggccgctccaaggtctccgcccagcgtacgtaacttcttagtggcaaacagcagaacgaccagcgccgcaactaccagcagtttggtaatactaatctcacccatagataccttcttgacatat

SEQ ID NO: 51424 - DNA, 1348 bp, Arabidopsis thaliana
tcctcttttcggtgcgttaatcatagtatgattcaccactggcttcttcgtttttgaaatttgatcttgtgtatcaatccttttgagttcttcattgttagggacatggatgttttaactgtatactatgtttgtaggatttatagctgtttaaaggcatgctgaggaacttgcattctgaaatttatgttttcttaaccaaagagctttgtttgttcttagcattggaaattttgttgtgttttaagcgtttctgtaatatacagcatctgatcaatatatttttttctcttggtttattacgttggttttagtatttaaggtttcactgaatttgttattattgatttgtttggatgaatttggtatacttggcttctctgattcattctttcgtccagaaggaaatgaacatttgagtttattgatggattatggattgacctgtttagatgtaattctttggttgatgactaaagctccttgcttgtaaatcattggaatgcgttatccatagtgtgattcacattggcttctagattccaattttttgttcttctgtttccatgttgatcattgaatttgttctcttgttttttttatggagattatcgtatttaagtttccactccccgagtttgatacgatggtttgaattgtttggatggatctcatacttcatggaatccgttttatgtacttttgtttttccttagaagattatacatcaatggtcacatcttgattgtggtagtcccgtggcttattcttattcttgtagaacacttgaccaagtataaagtttgcccttgatgtgaaatattaatgtttcatgctattttcaggttttgcttctcaagtcattactcagggaaatgagataggttttggttcggaagtcccagccacagtcgaagctgtcaaaacacctaactcaaagattgtctatgacgaccataaccatgagcgttacccacctggtgaccctagcaagcgggcattcgcctattttgtcttgtcgggtggaaggtttgtttatgcctctgttctccgcctgcttgttctgaagcttattgtgagcatgtctgcaagtaaagatgtccttgcccttgcatccctcgaggttgacctagggagcatagaaccaggaactaccgtgacagtcaagtggcgtggaaagcccgtcttcatcaggcgaagaacagaagatgacatcaagctggccaatagtgtggatgttggatcctgagggaccacaagaagactcggttagagtcaagaatccagaatggttgatcgtggttggagtatcactcatttggggtgcacccttgcctaatgctggtga

SEQ ID NO: 51425 - DNA, 1189 bp, Arabidopsis thaliana columbia
cttttattgaccctaaaatgtagttgaaagttgtttatcgagaatttccagatttcttggagctgttttagacaaatatgatgactcttttccttccacacgctttgatttccgaaaatataaacggacactagtcaaattaaccttaacaaattgacaagtcaaattgtatgttttgctcatgtgtccctcttgtcttaaaatggtcacctttcaacacattcatttcatggcatctccatccacctatgcgtgttgcagattctgaagtatctgactccaaaaacggccccttgatatgctcttccaagaagcaattttaaaacggttctaatgtaaagttagtactcgtggacttaggataaagaactatactggccaagcaattctgtttgaatcatgtttctcttaaaatccagtaaatagaagacaagaagaagtgatgacgaacggttccgaaatgcattttgtggcatattataaggtgaagtttttatctgttcccattcacaaaaccatgctagccaaactaccaacaaacataacaaactcaaatccaaacccaaagaaatttgtggcaaacctgtgtaaatccattcctgaaatcaatcttaagacagagtagaagtgataaagaacagttaccaaatgctgatctcatcaacaaaagtatgatagccaacaaccaacaaacatcacaaactcaaatccaaacccaaaacaaatttgtagccaacctatataattccatcccagatatcaatcttaagaacttggtcatcagttattctttcactaacatattcatcaaaatcaccttagcttagaatagcagacgaaaaaggtcgctgcaaccaaaccagcagctccaactgatccagcagcaaccactggccactgatactcagcttccaaggaacccttttggtcaccaccatttgtgtctctgactccattactaggcttcatggttctctcattcaaagcaaaaaccgtcttgttaccttcctcaaccttcttcagtaactcgtccttcttcaactccagctccttctctcgtttttgagtttcactcaaagcttcctccgtgagcttcttcttagacttccatttcttcaattcttctacattcttcaccaattccagattcaaaacaatgactgtcttctgcaattcctcaatctctctc

SEQ ID NO: 51426 - DNA, 930 bp, Arabidopsis thaliana
ttttttttatttgaatcattatagtaatcgtagctttgtagatttcttgctgtataaatctctagaaaatcgctcaacggttcacggaatgtgattcaagaatcttgtttatgtttgttctttgatttaggtatctaggttcgtgtgagaaaacagaacaatataatgtatccttgtggttacgttgctcaagtcaccaacttgtctcctcaagccactgagaaagatgttcataggttcttctctcactgtggtatcgtcgagctcgttgaaatcaccgggtaacaacaacgttcattgttcagtaaattattaatcattcttgaatctgtttatattttgtttcatgtctccatggatttcaggtgccaaggggatgcattaacggcttatgtaaccttcagagatgcgtatgtctggatatggctgtgttacttagcgtaagtcccttaattagctagaaatttccagtatgatcttcttggcattgattttaatgttgatcttcagggagctacgatcgttgatcaaaccgtttggatatcggtctacggtgtctatttacatgaatctaacaatctcagacaagaagaagactatagtgttacggtaacattaaaaacaatacttactaggttactttaggttataagccaaagattctcgagaatgtttctttgtaggtgactcgttcagacgcgtttgcttcatcgcctggagaggccataaccgtggctcaacaagttgtgcagacgatgttagctaaaggctacgttttaagcaaagacgcgattggtaaagccaaagctttggatgagtctcagagattttcaagcttggtagcgaccaaattggcagagatcagccattaccttggcctcacacagaacattcagtcgagtatggactcgtgagatcacggacgagaag

SEQ ID NO: 51427 - DNA, 521 bp, Arabidopsis thaliana
catatctttcatcactattttatatcatttctcatcattcttgcatactttgcatgattaggatagctttgcatacatattgtatttttgagttgttttcaggtgatttgggctgttggcgaggaaattggaagaagcgagccagaaccagaagacatactcgacccccaggtcgagtacatccaacaccatactcgaccccctggtcgagtgacattggagccattcttccaatctactcgaccccgtggtcgagtaaccatagctcaggccactcgatgacaccactcgaccccatggtcgagtatcactacaccacaccacttgaccatcactcggccattcactctaccacatcactcaaccccctggtcgagtatcatcactcaacaccaacaccatcactcgaccaaacactcgagtcacatcttcaaagtctactcaaattcgcacttaacaagacaagctgagcacaaggacgagaagaggagaagaagaagtgtttggaagcggtctggagc

SEQ ID NO: 51428 - DNA, 560 bp, Arabidopsis thaliana columbia
aatattaatgaaatgtcttcaacatgagacataatccgcatcaaaaatacaaaatcatttttttgccaactacaaaatcataaagcacaataatgggtgtaattgttttgttacgataaattaaaaacaatgtatataaatatatatatattaaaacatttatatgcaaggtttgtatttgtacttatgatcattttaatgttacatatagttctgaggaatgattcgcatatgacttgatccaacataattccatcgtgattttttcatcatgcattcattttttttttcatgctacgtagagaaatgtgccaagcatggagtctttggtatacttttaacaggagcatggagcatggagtatttggtataatgtagaattaggtattcaactgacttgcttttattgatttactaattatggtatttatacacaatgatctctatcaagagataaacataaattcctaacatataggttagaaactctatcaccaaagatattgtactaatcctaatcggattcacatatcccaatactcccgcacgacaaacgtgat

SEQ ID NO: 51429 - DNA, 383 bp, Arabidopsis thaliana columbia
tcgaatttgcagttaccctatttgacttttgaagactttttcggacacgtaaaaaactaatccagtaaaaaactgcaaattactgtttgttgtagaagacgactcgggcgacatcatcctcttcagtttttccggtgactctgtttgcgcagacaacgacgcagatgattttccggtgactatgttcgctcagacgacgacggagatgacgacgacttctaatttagttcccaaaccctaaattctctccaacttctccgtcattgtccaccaccactgctgcacacgactttctctcttgtgatctctccaccggtatttccccaaatttcttcatgttcttatatcgaattggatttatggttcatgtaaaatttggttcg

SEQ ID NO: 51430 - DNA, 549 bp, Arabidopsis thaliana
gattccgttaccggatggtggtttttgacctgactgaaaccggtgacggtggtgtggttatggataccggaacagccgtcacaagacttcccacggcggcttacgtcgcttttcgagatggattcaagtcgcagacagcgaatttgccgcgggcttccggtgtatcgatattcgacacgtgttatgatctgtcagggtttgtttcggtacgagtcccgaccgtgtcgttctatttcacggaaggtccggttttgacattaccggcgaggaattttctgatgccggtggatgattcgggaacgtattgttttgcgtttgcggcgtctccgacgggtttgtcaataatagggaacatacaacaagaagggattcaagtatctttcgacggagccaatggctttgttggttttggccccaacgtttgctagcggttaagatagagaaattacgatttttgtttgctagtaagtaaaaagcttttgtctcaaaactatatatgtatttgtctctttttttctttcttattagtttggtctgccgggatcctct

SEQ ID NO: 51431 - DNA, 447 bp, Arabidopsis thaliana columbia
taacaggcaaatcaaagagattcttgagaaaacagtgggtaatgcgaaaaaggagtgatcctacaagttagatgatgcactgtgggcctacaggacagatttagctactccatctggaattataccagttcatctccgatatggtaaagcatgtcatcttccagtggaattagagcaagcagcttgggcagtcaagatgatgaatttcgacatcaaatcagctgaatgagcttgatgaaatacgaattcacgcttatgacaactcgaagctctacaaggaacgaacaaaaggctaccacgacaagaagatccttactcggacctttgagcctaatgaccaggtacttctttatgattctagattgacattatttcctggcaaattgtcttctcgttggacaggtccctcacagttcactcggttaggtcatatggaacaatcattct

SEQ ID NO: 51432 - DNA, 511 bp, Arabidopsis thaliana columbia
ggttgtgtaaattatgttacggctgagttacatcaaattatggttcagttacattacgttacggctgagttacatcactttacggctgatttataatatagattggaaaacaacatttttctggggaagacaatataaaatttattggccaaataacaacaatcaaattaagaaacgtaagaatatgtttgagggatacataggaggaagacgaaaccgtatgaatcaaaacgttgatagaagtagaaatatctctaaatagatcgattgagagaaaaattaaacgagagacatataaaatcaaagtaaaagagtagctattcttgattcaacttaaacctgcaacgaatcatacaaaattccatacatctctttgatttgggttttgatttttgatgacttgaaattcgacaccaccgaaggagtttcggccggaagaaacgagataagtagagaacggcgacgaaattaggttccgtcgactgaacaagagaagagagtgacgtttttt

SEQ ID NO: 51433 - DNA, 945 bp, Arabidopsis thaliana
tgtgcaaaaccaccctaatccagaaaacttatcgcttcctttccaagatccgtccacaaaacaacgaaaacctgaataaatattatcgtgtgatatattctggacccgaatttgtttttccgatcccatggaaccgttatttttggtattgagcttaaattgagctaactgccataattgtgcctctttttctgctaaacataatacgtctaacggatctttatccacattttcaaatatttttttgttccttactttccaaatataccagattatctatggaaatgaagatgaatctaattctgaaggtattcttgagaataagtgatcaaaattcgtaaaaatagaatccgtaggaaaaattcctggaaccgtaggaatctttgagagagcccatatctgtctcgccggatgacattggaaaagggtatggtttattgtctccgtaatagcgccacatctgacacatcctgtatcacaatttatacctcttcttcgtaaattctctgtgacaggtacacaatctgacaatgtttgatccatttcccaagccttatagtcgagatatgaatataatcgcaataataagcactatttggactgaaaccatgttgaccgctatgttagcagattttccttaaggtgaaagatatgaatttagaaaagttttataaaggtttagatatgtatgaaaacatttggcttataaaggtaatctatttttgataaccaagtcttatgatatcatgcattcaccttttattaatacggtagtatagtgtgtttgttcatgtgttctaatgcaaggggtaagccagatatttataaaaacatcaaaatgttaggataaccagttaaaattctgtaatatgtaaaattatattaatattttgagaattcttaaagtaccacatatttaagtataatgccaaattaatttttgta

SEQ ID NO: 51434 - DNA, 412 bp, Arabidopsis thaliana columbia
tgttttgcttgagggcaagcaaaagctaagtttgagagagttgatatacctctatttttactacttttagctatgatttaggtataggttttagagtctatttgttatttctatagtcttttgtagttcttttcaggtttttacatgtttgtcatgcatttcgaaattattgagcattctggaggaaaaagagaacttatgctgcagaagaaatctagagaccaaaaaaccacgtaggtgtcgaccgacaccaccaccgctggtgtcgagtgacactaatacctgacgacaattcaaatacgcaaaattattgaagttttgaagatttccaaattcgtccttgaaatcttccttatttttaaagaagttcctgcacgttttaggacatctaatatatatatatatatatata

SEQ ID NO: 51435 - DNA, 725 bp, Arabidopsis thaliana columbia
caagaaaacaggcgattaacgacctacaagtcagtcgtttcgtagtcgtaaataatgataatacgactaatccgcgactaataactgtagtcattaatccatagtcgctaagtatagtagtcgttaattagtcgttggtcaacgacaataatacgacaaccgactaaacagtaaatgttcgtcgttacgtagtcgtactaaatcggcgactaattgacgaccatcttacgattagtcgtactgtacagagcgtgtgaggacatggagtcgtttagtagtcgttaatagtgtacgacgactttacgactatgttgcgattaaatattctaaaccctggatatgtttccagttgtcgtaaaatagtcgtaaacttttgtacgacgaatcgacgactgtttgacgattaaatgtactttaccaaggatttgaaacttttagtcataacatagtcgtataagtatatacgactattggacgtctgttttacgataagattatgacttatatttttagtcttataattgtcgtaaagttatgtgactaattgacgactattaatggactaaattgctacttatttactactttttttgcgactaatagtttggtccgaataaggatttggtcacaattgttgggttcttgtttgttgtttacagtcacgattgttcttgtttgttatttgatatgctataaaatatgaaaagacactactcatatattga

SEQ ID NO: 51436 - DNA, 591 bp, Arabidopsis thaliana
ctcaatgatggctggtttctcgcctaggttggactgagtttaaaaacaggatccagctgaatggtcgagtccagcaactgaaatttcaatctaagtagaagcctccccatcctgaacatcactgtcctcggtgattgatgtggagacatgtcgagtaggcagctctcgatcatgacaaatggtgatagcatgagcagtggcgtaatccttcgggttctgtatggactttcctggaagtcctgttactttgggagcggaggtcgacgcagtttgtccttccatgtatctgacctttgaggtgagtacctcaagtttgatattcagatcgttgaaagtgcaatcgaccttgttatgaatttctgccatctttttggcgagatccattgctcttgcaccttgtccttggagaattgctgtaacatgttcttcaagtctgaatctggagttgttgaagctggttgttgttgctgctgtgtgaaccaggtggtggaagttgctgctgatagttgcctggtactgctgcttaagaacatcccctgaccttggttgtatggacaaagggcttgggttgattctctgctgtgaagggta

SEQ ID NO: 51437 - DNA, 546 bp, Arabidopsis thaliana columbia
gtcacaatccaaagcctttgactaattataagagttaaagatagattaggagtgttttagtcaatacttatacccagttttttcctaaaagaggctaaaaccaagaaaaaattgcttggaagcaggtttttacgcctacttatgtgctgaatgctgtgtgagtttagttcaattcctctaaaacacaaacatgtcgatgcagttatagagggtgtcaatccagtccactgtattgctagcactcaagatgtgtacaaaaacaactaagtcaagccagattataatgatggtgggtatctagtaacaatcctaggtcaggattcaaacaagttaaaatgagaacttaaaagccctactcgatcattgggtcgagtaggaccaacatgtgacaaaattaagaactaaaatgcaatcaacaggggatgaaaatagaggattccagtaacaggtaaataaaagtgcaatcaacaggggatgaaaatcaatctaatagaagttctcaggatggattcattgaaaagggcatctcggttcatcaaatgggta

SEQ ID NO: 51438 - DNA, 557 bp, Arabidopsis thaliana columbia
atcttcaaatctgtttccgtctgtcaccttcatttaatttttataattaattggcgtgtgttaaaattgcgaaatcaactgtcacaggtttggaaaagagtctactatttttgaaaaaatttctgaaatatttggaaacgatttggtagtttttagcatcccaacaagtgaaactatcgtaattaggattctagggtatctgaagggtctgttcgtgtttgtttcaaaagaactagttactggtgttgttttgttgtctcgattgcagaaagaatggctgaaactgaagaggaagagactaaccacaatcgcaacaacaaacttttggtggaagcctttgagaaaatgatggacaccaaactgaatgcttttcgccaagtgtttcactgagacactagaattagggcagactcgtcctcgagtacaaagaagagttgatgagcagcttgagcaaagagatgaagctacagatcagtactatgggcataggagctctgtatctcgcaatagtcataggagacaccatagacgtgctaatgaaggtagagatcttttgc

SEQ ID NO: 51439 - DNA, 906 bp, Arabidopsis thaliana
agtggacctggaccgaaccaacatcaataagaaatggctcctcctcgtcgacggctcctcaaatcgacaaggatccggagtcagaatacaactcacctccatcactggagaggtcattgaacaatcattccgacttggatttaatgcattgaacaacgaatcagaatatgaagccctcctctctggcataaagctagctcaaggaatggggatccgtgaatacgaggctaaagacgaatgcatggaagcgtacctcgaacttgtcaaaacgttgtccaaacaattcgaatcgttcgagctgactaggatccctaagggagagatctcacttccacttcagatccttttgtcaaacaaataatcacagtcgaaagaatagaacaccctgagcgttaacttaacggttaaacacgctgggacagaacctcggcaacgtgcaattttacacagcgtttccggcccttacatggtatgcacctagatgcagaagataaagacctcatgaagagcatgcacgagggacagtttagtagccactgcagtggacgaaccctcgccctcagaatcaagaagcaaggttacttatagccgacaatgctagccgattgcataactcactcactcaaatgcgataagtgccaatgccacgcacctaccctacaccaagaacccaaggaaatgtcgtcaatcttgtctccctacccattcatgaagtggtccaaggatgtcgtaggacccatggaagcttccgggggaaaaaagagactaaaattcctactggtcttcactgactactctaccaaatggattgaggccaaagcctaccaacaagtaaccgagaaacatgtcaaggtttttttgaaggaaaatatcgtatgccggcacagtatattgtacaaaatcgtc

SEQ ID NO: 51440 - DNA, 500 bp, Arabidopsis thaliana columbia
gagttatatggatcgtgtgaatggttatattggaatgcatatgtgatctttagattcttatgctattatttatggttgggaggttgtgttgggatattgatgattctatgtgtttgatttaaccatatatttcataatatcttaaactttggggtcttggtacatggtgattgtggtaggaggcaaagaccataagcgtgccaagatcatgatatgtctgaccttcatggtgtggcgatccataaagataaagaaagctttcttgtagttccgcttcttgctcttcaaattctgaaagactcgtcggaaattgccggtgccggttggtccaaccaagaaaggcatgggagtctttgggcactagttgggtcgagtgacgttgtactgcgggagatcacgggagtgtgtgtgtttggtgttaggttagaaggcagcatatcgggccctttaaaactcaatagaaattggagccttaatgcatgtgcatatttttttgttgt

SEQ ID NO: 51441 - DNA, 414 bp, Arabidopsis thaliana columbia
tggtgtgaaataaaaacaagcttgtcaaaaacaagattttaaacgttaaaaacatcaagctcccccttaaattagtttctcccatcatcagattcagacacatctcctcctgcttaagtgcatgacttagtcaaaaatcacacaaacatcattagctgagatataatatttcaaaggaaaacagaaaaacacttacttgcatctaaagcagtctgcagaacttcaatggccagtttcattgctctacgatgttctgaaccatcagtggagtcaccagcttgcactccttgggttgatggcttctttgcagtcttcttcttagtctggactaagggctctggcttctcaacaaacttcacaggatgctgcatctgaagaagttgatacacaggactcggaaacggaatgtagaac

SEQ ID NO: 51442 - DNA, 550 bp, Arabidopsis thaliana columbia
tttttaccctcaattcaaggaaacgtaattagaaataaaggaaatctctctctctctctctctctctctctctctatgactcgcagagcctctctctccatagtttctgggctcgattttattccgtctccatcgcttctgggctctattcctctttcgattatggcggcggctcaccagaaatcggtggtaccgattctgcaaacaaataagagaagcttcttaaacaattcgatctcgattatctcaggaatttggtaaaagttctatatccataaggtcttggaggcggaggtctttgcaaactgtaagaaaaatcaacaaacaattttttagtatccataataacaagtccatttaaatatatacatttggaaacctttatactgatccatatccattctatataacatgtccataataacatgagattcgattaaccatggtttgtaaagaaaccaaagttccatgtccataaggccttggaggtggaggtctctgcagactgatagataaattaacgaacaattttttggtaccataataatga

SEQ ID NO: 51443 - DNA, 790 bp, Arabidopsis thaliana columbia
caatataccatacaaacaaactacttttggatttcactgatatgcttctccgatatttgaatagtattcatcataatcaaaatatatatttattggaaggttgctcattctcctgggaaaaaaacattagctgttatctcagaaattccagttgtaccagatataccacttgaaagagttataccacgtttctcacttatacccggatttttatgttctatcaaattgattctcggacccaaaacactaatctgcctaagattaactatgaatcaaccattaccgtacattcaaatgtcttaatcgacccagaatacatcgttaccaacataatctccattaattttaacaccaatttcaaacctatcaaatctaattgaaatctctaaaatacaaacataacaacacaagacttgatgaattaagatgtgaaaagaagaaaaagagaagggtaaagctcactttgaataacagaagaagaataacaacgagattgatcgattggattcgacgatggaggattcgacgatgactgcaaaagggcgtcgtcgattttgtcctgatgaggaaaaagggaaggtatttccaggtatttctgattggttaattttgtttttattttatgaattaaataaatagtattgcattggtttggaaaataaaccgtaatcggtttgttttgttcggttcgttgggtaagggtaacaaggatttttaaatttcattaagagtatgagagtaaatcagattatagaagagtatttagactcatttttgaagagtagagagt

SEQ ID NO: 51444 - DNA, 929 bp, Arabidopsis thaliana
tctaatcgtttacaacacaatcaatctgctgtctttttactttgttctctttttgtttcaatcatcacctgctagcttaatcttgatattaactcattgtttgaacaaaagtactttataaatttgatccttaaatactgcaattgatctcttatctgagagagtagttcttagggtaatttgaaacgtatcaaatttggcgccgtttgccgaagttcttgggagtcaccattgagtgtagtttagagattttgtctagtttttacttctattttgttactcaagcgtttcttgtttttttttttttttgtgtttcaggtgtatgcctaggcaaacaaggagcacacaacagaagcagctgatcaacttgtttgttctggacttgcgaaaacttgaacgcaccagtcaaaaaactcagagattagcaatggctgacagagtcatcagagctgatgtagaaggagttttgagagatgaggatggcagccatacaatgaggctggtcagagattggatgatcatggactcatcctacctaaggacgcaaatgaggatcaagcgcgtctcaatgcacaattagctgctagagatgcagcatggctcggtgtcgagcgacaccatcgggagcagcacgcagatgcaattggtgtcgatcgacaccatcgggagcagcacgcagatgcaatcggtgtcgatcgacaccatcgggagcagcacgcagatgcaatcggtgtcgaacgacacaacagaggtgtcgatcgacaccaacaccagattcctacagctattcctccagctgcggaaccacgtcgtactcttggggatttcaacaggccagacctgttctatgttaatcgatcagcgattgtacccccagccattccagaggaacgactatgagctgaagcctggctactttgcttacgttg

SEQ ID NO: 51445 - DNA, 547 bp, Arabidopsis thaliana
ctgctgctgctttctccattggttgtaacctcggattgagctgtagagttcattgattggttgctatttgtgggtggtgcttgtccttcttccgcaagctttttgaggaggttcatgaccgttggaatgaatttggttgacaaagagagaagtccaggtagctgttgttgatcatagatgaaacattggcatttcggtgagattataattgagatcaaatgaagaacaggggcaaaagtaaaaatatggatgttggatatcgtgctcataccacgccgttttggaattctcctgaaatatttaattgcacccacaaggctttggatacaaggtatccgacaaatagaactaagagccatagaggatttctgccatgagagatgcaggcacgaagagccaaagtgagtacggaatcttgattgtatgaaaaagccgccgagtcaattcaaaagaatggacaaggagggtaccttaagagagtcataaattcattaaatccaagaacaaccagggcaaggattgccatggaggtggcagccagttgtta

SEQ ID NO: 51446 - DNA, 857 bp, Arabidopsis thaliana columbia
ctctccattaaaccgtagtttgataattgtttacagagacggagggaaggatcaacgagaggatgaaaactctgcaagaactccttcctcgctgcagaaaggtctctctcagttatttataacctgtggctgttaaacataaaaaaagttagattctgatgacatctgtttctattctgatcagactgataaagtttcaatgcttgaagatgttatcgagtacgtgaaatcgctacagctgcaaatacaggcatgtactcaaaaactgaatgtgtgttaaagcaaaacacaaccggaaattaagtgctgtggaatagttgaacatggttatttgagtgctatggaatggttatactctttgtttatcaaccagcgtctctgcattttaaacaaccaattttttagatttgatttctgcagattcatcttggaagggttttaaagtgtcatggaagataaatgcaaatcttataagtcatgttcttgaggtcttactcttctgtattgcttcacacgtttacaggattatgttgaagaatctacagcttataactgagattttaatatatgaatcaatgttgttatgccagatgatgtcgatgggacatggtatgatgccaccgatgatgcatgaggggaatacgcaacagttcatgccccacatggccatggggatgaagggtatgaaccggcctcctcctttcgtaccgttccccggcaaaacttttcctaggccgggtcatatggcaggtgtaggtccatcatacccagcattgcgctacccttttccagacacacaagcctctgacctatccagagtccatgtaccaagtctgcactctaacccggtgccaaac

SEQ ID NO: 51447 - DNA, 1286 bp, Arabidopsis thaliana columbia
gtggttgcgacgaaatgaaagaaggatgtgataacatggcaagcctttagcttaggcagtcccatgtcaaagaaggtagatgagaaacataccttgggttcctcttcttttccttatttgacatgagattgccaagctataaggcttgtgttaatactttttcatattctcttgtgcaatctgaaagttttatcttcatccatatcatcatctttgtctttcaccaccacagggcaggctgagtttgtgataaccaagacaaacttataaatgtaacatgatggaaacaacatttccagaaaccaaatggaacataaacatcagctaaagtgacaattaaccatgctattctcaatcaacaaggactataccatcattcttctattaagcaagtcatcaccatctttcatctatacgaggattgaacattatatattgaacaaacaaaatgggataaagacttgtcaaagcagcaacaagttccaaaagagtgactgagagcttacaaaaaaggcaaagcgataggatttgataaggtttcaagcctgagtgcctgtcaacgacttcatctgaatgtgattagaatcagcattgttagtcggcaaagcttcataagaaccagttcttctcactccggccgccatcaccaccatcgtgtaagtcacaaagatgaggataaccacaagcacgacgtgtacagtgaacattagatccaatatagaaacagctcttagcttagagtcctgaatatcacattgggttgatccttcaacaccgctttgaacatcaagaagacgatgacatccctcaggaataaacccatcaacgtagagagagagtccagtctgaagctgccagagaccttgaagacaaatggcagcagcgagagagcgtcagatataaagagtcttgaacggcaagcgagaagcaaacagaggagagagcataacgcggagatacgagcagagagggaatcacaatgagcttgaagatcagatgtttgaattgcagctgatgaagacgcggcggagtaatggaggaagaaaccaacggaggcgagtgcgaagaggagatcggaagggagagggattaacgaggttgaatcggagaggagatagtaaatggcgatgatgaggaagaggaagaacacggcggcggaattgagagatgagaatcggtgaacaggagtacttcctttgacgagaggatcggagtagaaggagattagggtttcgtgaaggaaagcgacgaatagagagagtatgaggatgaccagtggtagattt

SEQ ID NO: 51448 - DNA, 332 bp, Arabidopsis thaliana columbia
gaaataattactagaatagaacacaattgtatgtttattcatacaatagaacatatcttttttttttattcgtatgttttcagtacttgtgtaattacacttaatacccttgattagttttaattaaatattattattaaattcgtttctaattaaaaaataaataaaaaaacagtgattatccatgtcatcagttcatgtcatttaccctaatccacgtcatccgaaaccaaaaattcccttaaaactttcagtttctcattttttcagcacatcttactgttcatccgcgcaaaaaaaaaaaaaaaaaaagaaaaaaaaaaaaggggggg

SEQ ID NO: 51449 - DNA, 752 bp, Arabidopsis thaliana columbia
actccagtgagttatcggaaaagaagcaaaaaccgcagggtaaactctgctcagtgtagtataaaattcgatctttcttgatcaattgctagatttcaggcaactacctagagaacaacattacattgcctgtttgttgaatcctttccttccttattttatatgctcagctcgagcagttaagcagcaacgctttttctttttattcctgagatcacatttaatttcccatttggaatgtattttatttaggtttgaaattcacaaagtattatgtgattatactttttttaacttatattttgattcatataacaattcccacacagaaattcattcaagcaccaaattatgaaacaatgatttaccatagactaataatctctcttaaaaagggatgagaaaatcgtgaaggacacgataatgaaccatacatttttttttttttaactttttttgaatataaagaagatttccggttagatcaatgtaatgaatagtacccaaatgaagaagtctcaaaacaagtgatataataattgattgtcagtacacagagtgctcgctaataacaacatatactcgattaggcatctagcgtttccactcttgcttgcaactactagtaaaacattctaaagaaacttaaaatctttcatcagtaaccgtagcctgagctgtaatccgtagcgtatcctccaggcgggtttgttggagccgctgcgtaaactgagccgtgtgttgcgtatggg

SEQ ID NO: 51450 - DNA, 525 bp, Arabidopsis thaliana columbia
gaagatgattttcacttatctaaggttttttcattggccagcaaatcatcacattgttctgtatacttcatggttaagattgtttaaagatcatctctttccagtttgtaagtgagctttgaaggtgttgatcgtaataaacatgaaactaaaaaactttcaaagtgtaaccacctcagcagcgaaccctctgtctgtagcagagtatcttaagacaatcaattttcttgcacgagacagacagacttcagattatcttaagacatatagaaggacttcgcaataacaaagagacggagacggagacgatcccttgtttctcgaatgttgagaaagactctaactttaatctcactaagaagacccttctcttcaattccctctaaaaccctaaccccacaccaaaagtcttcctttgaatcaactctccaccattccctaatcacccacgacactgatcaagcatggaaggtcttccgatccttcgctgccgcttcttctctcccggacaagcgtctcctcaat

SEQ ID NO: 51451 - DNA, 873 bp, Arabidopsis thaliana
gtggagggacaaaccttgagccaaagttcatagattatcgggatcacgcaccatcgcctttggcagctgaaaagggacagaagagacaaaatgtaaactagaagttttaattctcagtaggataaggcatatgatcctcatgtcagaaaagcaacaagataaaaaataacttaaactagagaatcaaaaagtgttttgattctcagcaggacagggcatatgatcctcatgtcaagttggctatatgatagcattagacctcctgcaataagacttttctagtcttaactacatataaatcaaacaacttgtggtcataaactaaccgcatatactacaatctgatcacattgcaatcagacaaacgaaataaatgggtccatcaaacagcacaaaagtagcatttttcatatggtatagtgtgctgcaattaacatctagatttgagatcaatacttacaacagagctgataggagtgaaggtatcttgtcctttcgcaaccgtccatgggagaccagatgcctgaaaaaaaatagaacgtaaacacgatatatgcttaagcacaaaactaaagtaataaacagattacccttcatgcaaaaccacacattcatgattttgttttatataaaaatggtggttaaaaacagtcctaaaagcctaaatcacgatcccaaatatgaaaatccatagagcttatagaagacttttcaataaagaatgagttatatcatcgatgttttgaccatttgtgcgggtttaactaagactaatccagagaattggtaaatgcaaagcgcaaagagaatagatcgaacattgtatgcatgtagtaaatcaccacaagatccattgatatgtaccaaagaggt

SEQ ID NO: 51452 - DNA, 1428 bp, Arabidopsis thaliana
gtagtccgtacatacgccttatgggtctatatataaatttacctctctgaatgtatatgtatttgactgacctattcgacatatacaagatgtattaagttccttttaaagttaattttctttatagaccgtccattttggcgtatatatatatagtattggtttatctaattaagaggtatcataaacctttctacaagaacatagcactattacattgcaacactttctacaaaaacaagatgaagattgcaacgttttctgttctactcttgcttttatttattttccccgtggcattagcgcagctgaaatttaagttttacagtgaatcgtgccctaatgcagagactatcgtagaaaacctggttcgccagcagtttgctcgtgacccttcaatcacggccgccttgactcgtatgcattttcacgactgttttgtccaggtatgaatctcatcaaacatcctcttcaggtttagtatcgttaattagtttttttttttggttaagggggccttaagaatatatcgttacgtttattagaaaagagatgcaatcaaagagaattatgtaagaaattattcaatcgagttaaaaacataataaatacgagcaaaaaaataaataatttctgaaaattgaatattgtcttctttgatttttctcgtcttaacttgaatattattcatttgatatatgtatgtgtaatttttctgaaaacaacaagtcgttgacatttcgtatagggctgcgacgcttctctcctcatagacccaacgacgtctcaactatcggaaaaaaacgccggcccaaactttagcgtgagagggttcgagctgatcgacgagatcaagacggcactcgaagctcaatgtccctctacggtctcgtgctccgatatagtcacgctcgccacacgtgacgccgtgttcttaggtggaggaccaagctacgtggtccccaccggacgtcgcgatggctttgtgtcgaatcctgaagacgccaatgagatcctccctccaccattcatatccgtcgaaggcatgttaagttttttcggcaacaaaggaatgaatgtttttgattccgtagctcttttgggggcgcacacggttgggatcgcgtcttgtggtaattttgtggaccgggtcacgaactttcaaggaaccggactgcccgacccatccatggaccccactttggctggcaggtaattgaaatctggttaagccgtgtttacgtacgtgattaactatagatgggttacgtactttacgttataaatttaatatttctcatatatataggctaaggaacacatgtgcggttccaggcggcttcgcggcactggaccagtcgatgccagtaacgccggtctcattcgacaacttgttctttggtcagatcagagagaggaaaggaattt

SEQ ID NO: 51453 - DNA, 450 bp, Arabidopsis thaliana
gatgatgaccataattttcataataatttgtaggttcaacaacaccataattcatattactactgcccgcactatctctacaaccttccccatgacgcaaccataaataatagttcgacataaatcctctattatatagatgcttcttcactagattaaattccaaatatttatcgttgagacacttacgacatgaggcagaatattgaaccatttgcacgagcaaatgattcatttgttgcttggtacatgaacccgcgcaatccatatatcctccctttcttctttggagccacctaagagaaactcaaaaccaaaacgaaaaccaagtcactatttcataatgcaacctaaactgagacaaacaaatcaagacaataatgaatccaattacatatgaaaccatcgacactaagcttagtaacaatgccaagacgaatacaaccacaa

SEQ ID NO: 51454 - DNA, 590 bp, Arabidopsis thaliana columbia
gatcccaaactagaaacgtgtctgactctctctcctattttttcattattttatatttttttgtctccagatactctctcagatactcccgatggagatgctctaacaaaacaattcaagtaaaatcaagaagtgctttagtccaattttttatttatttcacaaccatataaattttattttttatccaaaattttataaaacccaatagaccattgaaacgatgattggcctaccatcatcgaccttatttttatagaaacaaaatttctttctcattgattcatcgtaatactatttagtatttatttttaatatatgtagctatataattgtactctggattaaaaaaacatattctggatcttccactgtctactggtgggaaaatggctaagtaaagtaactatgcactacacatttactacaattcaaactaaatgttttggtccaagattttcgtctctgagaattaacatattaatagtggaacatgtcatctcaagtttttaatgtcacggtattataccaccaaacgacgagcataaacaacttggaaggaggctgacgaggagttagttggtaaaagc

SEQ ID NO: 51455 - DNA, 660 bp, Arabidopsis thaliana columbia
ctaaagtgatgatgtgtcaatcatatggagagagttggccaactttcatatatatgatttggcaaaagatctcaaaatctagattctctatttttgtagggaaacaatttttttcataatcttcaaagggtttaaaaagcaattttggaagaattaaaaaccactttgaaaaccacaactattcaaaaccataatttccttggaaaaataaagattttcataaaaacctcaaaaccatggtttttagtttcttttagaaacttggagaaatcactagaaaactagtttcccaaaattttaaataaaaaaatcattttttagaaatctttgtaaaaactaccttggtccattggttaaccaagtattaaataatttttctagacctagaggaccgcttaaaactagtaaaacattgaatgccaattgtgtgaaagaaaacccattccatgctttgctctcaatggatatataaccatgattcatttgaacatgtgatttgcttcctccatataatactgaggacatcgaattgtcatgtcattgtcacatccatatgagtcaggagacttattagagtccaaccatttgcattcaattattgttagtagcagagacccatcatcactttcacgctctacatctacgcttacaaaaacactc

SEQ ID NO: 51456 - DNA, 999 bp, Arabidopsis thaliana columbia
aatggtgtttatgtctttaatgttccagagagagaatgtattgaccgtagaagagtccatgccgtggtttgacttgatcccctttaaacaagaaactggtctgaaaaaatataagaaatagtttctgcaagttagatagtatccacaatatcatgtccactaaatcaaggaatgcaaattatttctctacacttctatgtgtgcaacaagtgaaatccatgtaaatgatatcaaaagatacaagttttagaaaaatataaacatatagatggacatataatgatggataacatattatgaaaacaatgacatcttttttcaagccagtttggtttgtagcaagagcgatgatgaagcaaatagtttagattttttctttttcactacaagaaaacaggcgatttgcgagagaaatttgcaatggaaaacatcactcaaattgctacagagttgcgagaggattgtgagggaacaggaccaagtcgatattccgtcgcaaactttgtgacgaatatttccctcacaaatttgtgagacaattgcgaggaaactgcgtggaagtcatgattccccgcaaaaacgtcgcaaattagcgagggctttgcgggaaactgagttcactcgcaaattgagttccacaatatcatgtccactaaatcaaggaatgcaaattatttctctacacttctatgggtccaacaagtgaaatccatgtaaatgatatcaaaatatacaagttttagcaaaatataaatatatagatggacagataatgataaaataacacattatgaaaacaatgacaccttttttcaagccaggttgttttgtaggaagagcgatgatgaagcaaatagtttagattttttctttttcgctacaagaaaacaggcgatttgcgagggaaatttgcgatggaaaacatccctcgcaaattgctacagagttgcgagactttgcgggaaactgagttctcgcaaattgagttcacaatattat

SEQ ID NO: 51457 - DNA, 591 bp, Arabidopsis thaliana columbia
atatttttgtcattgagtcatcagttacatagcccactcttagtcgttttcacttggtcatgccaccatgcttaaccactacattgctttgatttgctaaaagatgtaaccttagcatccaacattggtatctagtatcttctaatgtaaaaacacagtgtgattatcgttctcgaagttggaacatcctaaagtctaaatatatctatcttttttgggtgcagtgcattgggaacttgggtattctcagtcctaggcgcattggttgcaatcccggtaggcatcaaacgcaagtctctaggtccacttgtgttcttcggcacaaccggaacaatgctcgacattatcattggtgtgagtcaatgcgagagagaacacgcagaacaccaaacgaagttactccaagactctcaaaatgccacaacaacaacaacaaccaccaacacagagactgaggatagctcttccatgtcctaatcttttttacatctttctcattgatgtactttgatgctactcacaagttaaacttttttcaagatattgtgattattcacttctcttgagaaacaaagaaaaagcttttgatga

SEQ ID NO: 51458 - DNA, 577 bp, Arabidopsis thaliana columbia
tgagttgagccatcagttaaagctgagctacatgttctcgaacaaggctatgaaaaatatgtatattcgtaataacttagccgtaatatgtagatttccgcgacctttcatcttatgtgtagcattataattcagccgtaacatgtaaatttgctgcgaaacaataacagggagggaaaccaaaacgttcctcttaatgaggtggattatcataattttcattaatcatttttagttataaataataataaaaaatcttaattaaaaaaaactaatcaagagtgttaattttaattacacaattgcacaaaatatataagtaatgtttagagaatgtatgatattctaacaatattccaactttctataacatttcagtaaatatttcatatattttgggtaataagtttggcactttttaaattcactaaaataaatctaaaattctgaatttatttttcttatcaccattatatctttgccggcttgctgcgccttacgctaataactattctaatagactaataacaggagagtgaagcctatttaacgccccgccgttcctatatgtggatct

SEQ ID NO: 51459 - DNA, 960 bp, Arabidopsis thaliana columbia
gagtgttgaaaggttcagttcctctggtgtataaagtgttttcttcttgatatcgattttttgtgatctaggatcatagttttgtcattgagtcatgaggtatgtagcccactcttagtaaatttcacttgttcataccatcatgctagccactacattgcttggcataaagaagtagccgcagtatccaacatttgtatctagtatcttctaatataaaacacagtatgattgttgttctcgaaatcaaaacatcctaaagtgaaattttcgatcttttttgtgggtgcagtgcattagggacatgggtattctcagtcctaggcgcattggttgcaatcccggtaggcatcaaacgcaagtctcttgggccactcgtgtctttggcacaaccggaacaatgctcgacatcatcattggtgtaagtcaatgcgagagagaacacgcagaacaccaaatgaagttactccaagactctcaaaatgccacaacaacaaccaccaacacagagactgaagaaagctcttccatgtcctaatcttttttacatctttctcactaagactttgatgtaatttgatgccactcacaagttaaacttgttttaagatattgtgattatcccatgtatcttgagaaaacaaagaagaaagcttttcatgattacaactgattcattgacattgtcatctccaccaagaaattgcaacacacgaagcaatagaatttaatacgataatatatctgaaactgttacgagcaatgtatatgaatcgataaatcttggactccaatatcaaatggtattcaaaaactaaaaaggttcaaagtgaaaacttttatcaacaaactcttgttcaaactaatgaaacaaagaaagattattataacgataaacgatgaatctcactaaaacgacggcgttccaagtcgaaagcagagggaatgttgaaagttagg

SEQ ID NO: 51460 - DNA, 478 bp, Arabidopsis thaliana columbia
tgtcgttgtagtactgaaggttgtcaatcccaatgagtgtgatgctaacaatcaagatgcaatcagagttcacagagtcaagccaaacaataacaggtttttgtgtgttctaacagtcctaagtgaacatgcataaaacagaaaataagacagaaacaataaaccactcgaccaacacagctcgttgtagagcactgggtgtggtcgagtgactggtcgagtaacaggcagtaaatgaaacaaagatactcgactgtacagtctgttgccagacaactgggtggtcgagtatcacgtcgaataacaggaaagaattgcaaaaactaagcaacatgtgacaatatgcagtaaacaacagcagagtaaacaaaaaaatcaattagataaagaaatcctcaaggatggggtaattgagtagttttgtttcctcagtttacaggtgatcgacatgctcaataaattatccctagacaacaag

SEQ ID NO: 51461 - DNA, 572 bp, Arabidopsis thaliana columbia
catcagctaagagacgatatcttccagtggttcgatcaattcttcgtaagcttactcgctaaaggtttgggaagaatgtttcactgttgtatcttattttgagtcgttagaatttcctgaagctttaagatcattgattttgattttacattctaaaatgacggaatcgttgtatcggctgcttatttagggttttgggttttttgtgctgttggtagcttttaattgagtgtatttggtatttttggattagttgaaaaatggttgggttagtttgaatccaattctcgctgagaattttatgctcacgatcattcacataagagattccgctatctgaagaaatcgaagcatgtgaaattttcccttttcctttcgatgtctgcgtttcgctgcgttgtcatcttttgttcttgccatgggacttaaaactaatatccttatacttttcattgcagcttaatgtttaacggcatcaccagcatcttgaaggagtactagttttggttagattcgtcatacatgtgtttgaattagagtaatttgaagggctgttttgttttgtgatggat

SEQ ID NO: 51462 - DNA, 396 bp, Arabidopsis thaliana columbia
ctagtaacagtgtgctctaaaggttgctggagctgaggatgtgtattgagtgaagaaaattactaggaaagttaaaggtagattgaattgtgtaactctactagttggtgatagttttgaacttttgacagaggaaaaaactcgactttgaatcttttactggtagattcagtggtgctatactttatagttactcggatctctgttacatttatagtttgatgtccacaattgcgagatctaggtgtaattgaatactgttctttaagatttatgctttacagaggaactgctaagagatctgatcatttttttgtttataaagttactgtgtcattactctgcattgagcaatgagtagcaacgaagtcggaatccccactaacaactctgata

SEQ ID NO: 51463 - DNA, 567 bp, Arabidopsis thaliana columbia
ggcagccacatgattatggcggcccgacatggccgtttctcagccaaagaatgttggagcagcttacccacctgcttgccgcctcaagctggtcgatgacgtagccgatatctggccgcaccttcgctacacacgctagtcatcagtcaagcacacgtccacctcaccctagctcacgtcgccgcaggacgctcacactttgttcacggtcatttacgggcataccacagacgtaccacgggcataccgcagacgtaccacatgcataccgcagacgtaccacatgcataccgcggacgtacgacaggcataccgcggatgtaccacggacataccatggacgtaccacgggcataccacggacgttcacgggcgaaccacagacattcacgggcgtaccacggacgttcacgggcgtaccacgggcaaggtccttggttagttttcttgtccttaagaaaatgcaacgacctaacataagaattcttgtcccgaatcttgcccgtccatgagtgatgcctttttacccattttggcaatggctccgcccaacctactcaaggtgag

SEQ ID NO: 51464 - DNA, 502 bp, Arabidopsis thaliana columbia
taacggccgccagtgtgctctatagaatagcaatatgtagataaaacaattgacaggatgcccgatggcatagatagagatcgaagaatccgttaggtcacagtcacacgtgaaggaggtacgagcgaagtgacacgtcggatgtagcactagatctaagacataagataacacaaagtacaaagggagaagagtggccatttccatgccagcttgtctcactcccattcttgcttttgtctttctttttcatgtcgtccactttctcatttccaatactagaaacaaaaacgagcattattgatcttttaaattgttacaaaatagtatatgggttaccttgtcgttttctcctaattatttcggtaattaatagtttaactatgccacaccataaacgatagaaaagtgggaaagctagctaatataataaactggtgtggcctccttaaaaaaacaaccaggtaacttatgtgattacttttaaaaagtttccagagtg

SEQ ID NO: 51465 - DNA, 533 bp, Arabidopsis thaliana columbia
tgcaccgttttcaggtgtttggaccaagtgatgctgttggatttgtccagaaacttttgaaggtaaatacctacagttgtcaaaatcactttgtcctccatttcacactctctttaactacatagaaagaagctcaaaaaacagatgtttttcggtagccatgtgagcaaaatggcttgttagaaccttgtgcacacaagtaaagagtgtcaagggaaattaaatgtgagaaactaagaggctaagaactatgattttgtaggagggcttgcatgtaagcacggtaagtcgccgtcttgtgaaggaagctgtgaaagaacgtcgttgcaaagacaactgcacagcaatcgtgatagtcttcaagcgggtatgactaaagaagagcctgactgacatgtgggcatctgtttttctggctcgtatgtgttttataaacctgttgttggtatttggtaaaatctttttgagctgtcaatggatcaattaaattcctggggccccatcgaaagaaaaatgagtttgaagataaacag

SEQ ID NO: 51466 - DNA, 740 bp, Arabidopsis thaliana columbia
gtgttctgctgttgtcgcaaaaaagttgcacaaagcgactgttttgtgacattttggaataggtcacaagacaaacttttgaaatccacatagtttgatccattctatagataaacattactgaaaaacaaccattttattacataaagaactgtaggtataccaattgattggtttcaaacttatttgagaacttgtttgaaaagatcaatcatgaaaatgaattcacatgaaccttatcatgtagattacgcgttagagaatgcgtgctcaagtatcagcaccactcacctgaatcccacatatgtcattgacgaggctgaaacattaatgaatgtatcttatcttcgacttggtttcaatacacataggaaaatacttacaactttgataagtcttcaaagaggaattggtagtatgaattacggaatgaataaagaaggttagaatacaacatggttataagttttacgagtttacctttgttcagtcctttagtccatgactcatgagattgtgaactataaaatatgcaacatggctataatgtggcaatcaatacttgcgaattttgatactgtctaaaatattttcctatagaatattaataaactaaatttaattggaaaagtgattacattcaaaatctattagttttgattaaacgataaattatgtggtgatttgctatacactaaattggtgaatacacttgcagaaagacatggtgacatttttgg

SEQ ID NO: 51467 - DNA, 566 bp, Arabidopsis thaliana columbia
taaaaccaaatacgtaaccgtgaatcatttgattgctttttcggatgattgaacttgcgatatgtttccccatcatggtattgattttaaaacctgcaatatgtttcccaagcatggtattgggtttctttccctcttcacaggggtgtctagtttgttctcttatgaggtagagttcaagaattcatgaaacttagtttttggtctctggattgcatgtcgagaacatcacactctctctagctgccgtatattagatttttattgttgtatcttttgctatttttgccagactctggttatctttgttttcatacatagtatacagcgttatcttggtctgtgatgaatcttttatgtaaaaggacaagaatggttatttcttgacatgatacgggatctaagttaggttctcagcttctgttgtttgtccccgtttatatttatgttgtcttttaccaggatatcggatttagagtggagtacataaatgcttcaggggaaaagaatgtgagtctgctcattaattccaaactctggttaactttacttcgcatagtatatat

SEQ ID NO: 51468 - DNA, 461 bp, Arabidopsis thaliana columbia
ttcttctgattctttgatgtaaaattgttactatgattgattgacaagtaaaatgtatagaaaatcgaattcttattgagagttaaacactttgcttttgtttgtcagactcgttggaatgttagaaacgtgagagcttaaccttaaagcttatgacaaagattctccagaccgttttttattacagttttgctatatacactacttactatggtctgcacctcaaaatacagagagcttaagagatgataaacagagacgagtttcggtctctcggggtctcatttcttttctggaagcttctccagcaactccggtatcacctcgaaaagatctccaacgagtccataatcagctacctacagtttcatagccaaacgttttttagaatactttggtcctaacttaaattgacagagaagaaccgtgtcaagtgtgtttgttacctggaaaataggtgc

SEQ ID NO: 51469 - DNA, 554 bp, Arabidopsis thaliana columbia
cgaactttttgtcttccctagaatatttaactcagccgtaacatgtaaattaaccaaacttttcgtcttctcttaagcatataactcagtcatgacatgtaaatttgccgcaaaacaataagagacgcaacatttcgtctaactttatcatcgagcaccaacttcacaagcttgtcgtgcattatttctgcatctatctgcacaactgtacaccctcttaatcagtgtaaatacgtatttgtgtttcgatactcaattaccggacacaacaacaaccggaaccggatcaaccatatcggaagaaggatgaaagaaattgaagaagaatgaagaagacaatgaggaattgtaagttccggtgatgtgaaaaactcaggtgaagaagacgagttgaaaaattttggctctatttacatggaatattgcagccgacgtcgttttgaattgatgaggtggcaagtaagccaccaaacgaacatgtaaatttgcctaaataacttagccatcaaacaaagctataagccagtcgcaacatgaatactattatagtaatt

SEQ ID NO: 51470 - DNA, 852 bp, Arabidopsis thaliana columbia
ccatgcatttttcgagatgaggagcaaaccttcctgcaacaatttgtcgcccacagttcatgcaattgaacacttcactagctacaggagggtgagtctgcccaaatatatcaacaacatatttggtgttggtttcgaggttgttgctaggatcagcgatcttcgcacgcgcttccactgacaatctcaactcttcttctactatatccaaatcacgatcaagtcctagtcgtgctacccgatgacactcagatgctacatcagctatcaccgaatccacaagatcaagaaaaatttgggacgaaagctgcaagcaaagttcaagagcaaagaaacgtaagtctaacttagtttccactaggcagttactttaacaaggaggagaaatcttaatagttttacatagaacgagaatgtggagcatataaacagtaattgaattcatcatgagatgagactaaatgaacaaatacctgagcatgggaagatttattatcctctgcgccagacattggaatcctctaaatacgagattgctcaacaaaatgtctgcgagaaaatcaaaaccaaatcgtaaagagagatttccatcaccatcaggagccctagaaaaagcgaatttctccagaaatcaaaaaagtcgatcatcactatctaacagattcgttttggagtttctgtgataggaaactctactactcattcctcacaactttactgtttcaggttccaaatcaaatcatccaataaaacaaacccagtctacaagcatagatacagaaacgaaatcgccgtagaatcagaaagcttacactgtagagccgagtcgcgacggtgaacggaggagggaga
